United States Patent Application Publication US 2026/0272820 A1 - sequence listing, part 2

SEQ ID NO: 20 - DNA, 3209394 bp, Candidatus Nitrosocosmicus unguis (residues 1-1,604,697 of 3,209,394)
  source 1..3209394: mol_type = genomic DNA
aaaaaaatcagtgctgacctgatggattgaatctgacatgggaatgatcagatagatgatatcgaagtatagatcactataatgctattataattgcattaaagatgatcctatagaacaaatctagctaatgtgtgattttattatttgtaaaaaaaaaacaacatacaaatctagtttttcgatcgttactctttctctttattgttaatctgaaatagaataacaataaagaaagaaactcaataaacgtcctttcaatttttcgatctattctttcctgagatggggaagaagataacagaagaggagaaatggacgatatttatatataaaataaacaaacaacccctaaaaaaagttagtttgtttatgtgagaatcaaccgacgatttataataaagtaaataataattctacagccattatttactttatttgactccggttgatcctgccggacccgactgctatcagagtgggactaagccatgcgagtcaacatagcaatatgtggcatacggctcagtaacacgtagtcaacatgcccaggggacgtggataacctcgggaaactgaggataaaccgcgataggtcatcacttctggaatgggtaatgacttaaatctatatggcccctggattggactgcggccgatcaggctgttggtgaggtaatggcccaccaaacctgtaaccggtacgggctctgagaggaggagcccggagatgggcactgagacaagggcccaggccctatggggcgcagcaggcgcgaaacctctgcaataggcgaaagcttgacagggttactctgagtgatttccgttaaggagatcttttggcacctctaaaaatggtgcagaataaggggtgggcaagtctggtgtcagccgccgcggtaataccagcaccccgagtggtcgggacgtttattgggcctaaagcatccgtagccggttctacaagtcttccgttaaatccacctgcttaacagatgggctgcggaagatactatagagctaggaggcgggagaggcaagcggtactcgatgggtaggggtaaaatccgttgatccattgaagaccaccagtggcgaaggcggcttgccagaacgcgctcgacggtgagggatgaaagctgggggagcaaaccggattagatacccgggtagtcccagctgtaaacgatgcagactcggtgatgagttggcttattgctaactcagtgccgcagggaagccgttaagtttgccgcctggggagtacggtcgcaagactgaaacttaaaggaattggcgggggagcaccacaaggggtgaagcctgcggttcaattggagtcaacgccggaaatcttaccgggggcgacagcagagtgaaggtcaagctgaagactttaccagacaagctgagaggaggtgcatggccgtcgccagctcgtgccgtgaggtgtcctgttaagtcaggtaacgagcgagatccctgcctctagttgctaccattattctcaggagtagtggagctaattagagggaccgccgtcgctgagacggaggaaggtgggggctacggcaggtcagtatgccccgaaaccctcgggccacacgcgggctgcaatggtaaggacaatgagtttcgattccgaaaggaggaggcaatctctaaaccttaccacagttatgattgagggctgaaactcgccctcatgaatatggaatccctagtaaccgcgtgtcactatcgcgcggtgaatacgtccctgctccttgcacacaccgcccgtcgcttcatcgaagttggttcttggcgaggtggtgcctaattggtactatcgaacctggggtcagcaacgagggagaagtcgtaacaaggtggccgtaggggaacctgcggccggatcacctccttagatattatattgtagtagtggtagtgggttagaaagggccttgtgctctttctaatctgcgagactttacaataattatactaataaaataaaatccctaaatctatctaccaaccaaccaaccaaccaaccaaccaaccaaccaaccaaccaaccaaccaatcaatcaatcaatcaatcaatcaatcaatcaatcctactatacacacttatctgtcctgtcctgtcctgtcctgtccattacgaatggacgattataagatagtatagcagtagagtagggtggtagataaagaagggagtgcaatcaaatcaaaactgatcaatcaattccttcatttttcatacggtttgaaaaactgattagtatgttgtatttttatacaaaaaatattcatatttgttagagttctattggcgtaatctgtgtaaatattataatgggttctaaacaaaatcataaatcatctatctgatcattccaattaaaatcagcatagtatcggatgcaattctttgtctcgtaaatgaggagtagaagataaagaatgaagttgatgtagtaaatgtgagtttacaatgatcatcatgtaaaggaaaactccaatcatatatggatagaaaataaattacatagaataactaatactaattcaaaattattatgataatagattattttctattcgcgtaataatggaatagtgaattgtagtaaaatattatgtgtaactggttgtagtgcaaacagatttaatatataaacatacatacgaaataccaataccaaccaaattgaattagacttttctaccacaagtggaactaactaactaactaactaactagataactaataacaaacaaaagatccaaaggacaaagaaagaaactccaaataaaaaagtaattaattaattaattaatttattaattaatttataactactggactggtgcaaagacgccgattggtggatgactcggcttgataagcgatgaaggacgtggcaagctgcgataagcctgggttaggtgcatgcgaccgacgaccccgggatttccgaatgaggtctctctatacactcccatgctttagctagggagagcaaaccgtccgaagtgaagcatctgagtaggacgaggaagagaaatcaattgagattccgttagtagcggcgagcgaaagcggaatagcccaaactgaatctgttatggtaacatgatagagatgtggtgttacgggtatgacgtataggatcctgtaatcgaagccaaagtgtactggaaagtaccggaatagagggtgatacccccgtaggcgaatgagagcaggattctgtcatattcagagtaactggccttggcagtggccagtgaagatgggtgaaagtagcatccaaggctaaatattcatcaagaccgatagaatactagtaccgtgagggaaagttgaaaagtaccccggaaggggggttaaaagcgcctgaaaccaatcggttacagacgtgtatggctcgaaaggatttctagagtcatacgttccgtctagaaacacgggccagggagattgctgtcatggcaagcttaacctttaacagagggaaggcgaagggaaaccgaatttgcgcattttttcatttgaaaaaagaggcaatggatctgaaagggtcttgagtcatggcagtaaggctagaaaccggacgatctagtcctggataagacgaaggtgagcgaaagctcgctggaggtctgcaagggtcctgacgtgcaaatcggtcccctgatctgggattaggggtcaaaaaccaatctagtccggtgatcgctagttcccaccgaagtggatcgcagtcctgccttagctgagattgcttgtacctgtagagcaccgatcgggcggtaagggctcgaaagagctcgccatccattcgaactccgaatgtgcaagcgtcgtagaagctaggaggcgggtttatgtggggtaagcctcataaccgagagggggacaacccagactaaagttaaggtccccaaatgtctactaagtgtcaaaccaaagggtgttttcgagcaaagacagcaggaaggtaggctcagaagcagccatccttcaaagagtgcgtaacagctcacctgccgagctcgaaagccccgaaaatgtacggggctcaagtagactaccgatactttagaccaccgacgatgtcggtgcgtggtaggtgggcgtagtgtttgggtagaagctgggctgtaaagtccagtggaccgaactactagtgcagatcctggtggtagtaacagcatagccgagtgagaatctcggcgaccgcatgggcaagggtttcccggcaatgcgtcatcagccgggagttagccggtcctaaaaacaacctcaacagaattgtttgaatgggaaactggttaatattccagtgccttgaaagttcgttattcacctcttctgtcgcttccggatagggtaagcagaaccgtcgttctgtctaagtattctagctttgaggagtgccgtaatggcgagaattaaagcgagataccaatggccttctgcaaggagggtttacttgattccaggagacaatgaaagcagaaataggaagatactttcaagaccgtaccgagatccgacactggtgccctggatgagaagtctaaggtctatcgggtataccgtatggcaagggaactcggcaaaatagctccgtacctatggtataaggagtgcctgcagtttttacgaggagtagggactgcaggtcgcagtgactagggggtcccgactgtttaataaaaacacaggtggtcgctagtccgaaaggatgtgtatggcctctgtatcctggccagtggcggtacctaaaacctgggttcaactgggctaagggccgctaaacgccgggagtaactctgactctcttaaggtagccaaatgccttgtcgggtaagttccgacgtgcatgaatggaacaacgagggccccgctgtccctgcctacaacccggtgaagccacataacggggacgaacagtccccgaacctctgtcggggagagaagaccctgtggagctttactgcagcctgttgttgcgatatggtgtcaaatgcagagagtagctgggagccgttatggtcagttctccgggactgatctaggcaaaagtgtaacaccagccatttgttaccgtatcgctaacctgtttaacagggacatcggcaggtgggcagttcggctggggcggcacccccttgaaaatgtatcgagggggcccaaagattggctcaggcgggacagaactccgccggtgagggcaaagccaaaagccagtctgactggattcccaatgatacgggattcagaggcgaaagccgggcttagcgatccatcatgtcctcactattgggggctggtggtgacagaaaagttaccctagggataacaggctcgtcgcgggcgagagctcccatcgaccccgcggtttggtacctcgatgtcggctcttcccatcctggttctgcagcaggagccaagggtggggctgctcgcccattaaaggggaacgtgagctgggtttagaccgtcgtgagacaggtcggtctctgcctgacaggggcgtggttgtctgaggggaagttgcccctagtacgagaggaacagggcagcgcagcctctggtttatcagttgtccgacagggcaagctgagcagctaagctgtttaggataactcctgaaagcatctaaggaggaagcctttcccgagaaaagacaaccttccgtaaggaggagggcggccatagaagatggcgttgatggaatggaggtgtaattatcaagccttcgggcgagatattcagcctgccatcaccaatagcccaacgcacctgatctgtaattaaaaaattacaaccgacaagtaactataaaaaacaaatacaaaaacaagcaagcaagcaaaagtatgtatgtaaaatacattatctttcttaattgcactcactcacaatacacaaaaaatatgaactacatttctatttcatgcgtaaagaatagcattataatttgtcaaagtaattttgatcatgttcagagttttatgatttttttcttctaaatgaattgttatgattggactttcttttatttgtggtagtcaaagggtgaattcaaactaacttgttatttgaaatcaaagctcgagtcctgttttcatctatggcttcttcaataaatgcatttacggtctcaatcgaatataatctcaaaatttcaactaatttagaatttctgtttaattcataatttttaatcttgcctttatatttattttctattacaatcttgttttgaactaattgaggaatgattctttggactgttcttagaggtatttcactagatttgcttatttctactgtagtaaaattaaactgctgatttattataaggaaatcaatcactctggcaatattatttctaaaaattctttctagcggtctattctttatgacagttaattctatattttcatccatgttaggtactatttctgacaatataaattgcttgtgccaaaactggcgctatagatcaaatcttaacgttatagctttcttcttgaaccctattttttcgtaaaatttagatactttttcatcacaatcaagaattattttatagcatccacggtcccgtgatatggtgattagcttttttattatttctctaccaatacctctaccttcgtacccttttctagttgctacatcttctatgtggccaaccttacctccgttatggataaatttttgttctataaataatgtagctgtgccgatgacctctcgactctttgcatcctctgatataattattacataatccttatttgttatgatttcttttatgatttctttttttaacacttcattggtgtctatgcctcctatcgtggataagtttgagagtgtttcaaaaaacccattatcaaaatcattctcttcaatttctcttattgtgaatgacatgcgttttaaattattttgacgtattgttaaattaatctttattcaagtctttgttctaaaacacgaaaatttggtttatggatattaaaattatataacatctcttcctagtggattgaacatacaattaatatctgtattttcatttgataccgtctccatcgtcttcgagtctataatctttattaatatttcttccaacatctcattgacgctatgccatcttgagaatgcattagttttgaaacaacaattctctggataaatgatattgatatcaccttgttaaatgtatgtaactataactagcattgtcttttcacggacgaactttgtactattaaaattaaactatcaaatgtcttcagcttattctattgtataaaggaattacgaattctttagaaatgctaattaatatatttcctttaatcaattattagtgtaaaaataatatccatgacgtccgaagttgaaattaacaatccttacaagaataagatggctagaataatggtagtggatgatgaaaaagatattcttagagttattaagagagatttggaaataacaaatgaatttaaggtggaagtattttctagtggccaagatgcgtttagctcttttaaaaatcatgaatcaggctactatgacgtaatcatcactgatattagaatgccgaggatgaatggtttcgagctatatagaaatatcaaggaaatgcgccctgataccaaaattgcgtttattactgcgtttgaaataaacagagatgaatttacaaaagttcttccttcaattgatgttaaagatttcattatcaaaccgatcgatatgaatgatttagttttcaagattaaatctatgttagcaatttaaatggaatttttataccaaaaatgttaaacagcttgtaaatgataagtatagtatcatctagaaataatattttcttgctaattcttgtaattggcgtaggtatttctttgtctatattatcttatcattattctggcctaaccgcagatcaaattggtgagattgcttctagtgatatcaggtcaaatgctattattgaaacagatggtctttctaaaactctgttacatatcatagatccagtatctactaacctcgagatcttatctaaaatcgtaaactacagtaatatagatggaactaagataattatggatgaagttcagaactcgacaaagtcattgactgagggatattattggataaatgaaaacggtcgaattgtctcaataagcaacgttaactctagtataattgattcatatagtgatattgatctaagtaatcgagaatattttgtgatccctaaagagactcatgctagctattatagtagtgcaatagagtctatagataaaattccgcgactttatatatcatttcctattatgaaacaatccgccggagaacctgtgtttaaaggggttatcgttgcatcaatcaaaatccatgaattaggtcgtttcttacaaagcgaattggcccctcaagtagcaggcaatgttggattaatggataagaatggtattattatttatggtagtaatccttcgctcattggaaaatattatcttggagaagaatttcaatccctagtacccgaggaaattagaggaccatataattctctattggctagatctcttcaaggatctgctggagccgaagatctaatactagatgggggaaacaagactactattacctatcaaccagtttatatcggtggaaagtatttgtggactttgtttgtaagctctccacatcaattggcagctgaggtggggttcttgattaataatcagaaaaattttagcactttaatgatcctgataattggagcggtagccttgggcattgcgtttttgatcctttcctggaataaacgactagagtcagcagtaaattcgagaactatagagctaaaagatgcaaataattcattgataaattacaataagttactcgaatcggccaatgaaaaactaagcattcatgataagatgcagaaagaattcataaatattgctgctcatgaattgagaactcccataatgcctatacttggagatgcaatatttcttgaaaagcaattcgaagatggaaaagaagaagtcaaagttgacagagaacaagtgagttctattattagaaacgccaaacgcttaaagagattagcatcagatattttggatattactaagattgaaagtcagtccctgaagcttaacaaagaacgctttaatattaaggacattattttgtcatcgatcagtgatataaaaacccagctattaagcagtaatccagaacagctggaaaatttgaatataatctatgaaccccaagacatttttgtatttgcagacaaaaatcgaatcacacaggttatttttaaccttcttggtaattctgtaaagtttactgaaaaaggatcgattggcatcgatgtgaaaatcgagagagatgcggtaaaaaatattgaaaatgtgatcgtcagtacctcggatactggacaaggtatcgatccagatatacttccaagattgtttacgaaatttacttccaagtcttttgaaggtactggtctgggcttgtttatatcaaaaagtattattaattctcataatggcaagatctgggcagtcaataatcctaatggcggtgccaccttttattttaaaatacctcaacagtgaattaattgggggtaaatcaatgatgcttttgcagattttatataattcgaattgatctcagctttgaaagtatagtactagactggaagaaaaactatctcgcagaatagaatgaaataaaattcagatgctggatctaatgtttctggatatatataatattattctgggttgttttccttttcgtggttcgtttttttggctagtcttttattccataacttacttgcgatgaataataaaactatggttattatcagtgatatttcaagaattattaaactcgtcacggtaagagtatcaaatatttgaatcaatactatgcccattatatttccggtaattaatgcgataaaaaaaatctttaatatctccttccttgtcatactgcgattatctcttcatattgtaaatttaaatatatttttattgaattgactaatttacatgactgactaaatattgaattaatgtagcccatatacagaatctatagggtaaaatatcaaaaaattatgttttattaaaagctgtcaaaacctccaccatcaaaatcaaaacctcctccccctgcgtctccgctctgcatgtctacattttctgttgctcctgtttccgtgacggctccagaatcagactccgaccccgtgccaccggtatctcctgcgtctccagccattgaactctccattggattaagggccatacccataaatgacattaatgacataaaaaacaccatatccataatgcctgaaaaaatcaaaaatggcatccatgatctgttatttcccataaatgtttgaagttgggccttatcaccttgtgaataccattgttgaacttgtctcaacttattctctagttcctgttgttttgaagttagtatttttaatccagtctctgttaatttatattgcattttcttccctaggaaaaattttttcttttcaaatttaatgacaagtcgttgactttctaattccttaagaattgtctcaacttctgattttgtaagttttgtaaattttatgattttatctaaagtattaaaattcttatatattgcattaagaactatgaaatgtgttggactatcattaagattgaatgacatatttataaaatatataaaggtatacttaaatactattgcatttttgcatttctattaaattggtttttgtaatgaaaaagtgatctcctaataccgtgtcactgaaaaatttagcaagatgtaaatcttttctgcattatagatttcacccgctgaagaaataactaatcctagtaatcttacgatcattcgtatgtcctgtatcatccatatcaataatgtccactccatacactttttaacaaataccatattatgattaatgaaatcattacgagaaccggaacatccacagaaactaggaggttaaaaatagttatagttatactaactatttatctagcggtagaaatcgtggccggatatatcactggaagtctggctttgattgctgatgctctgcacatgtttgcagatgtcttcgggatctcacttgttcttgtggcttccatatttagtaaaaaacctccaactcctttacatacctacggattctataggtctgaaatcctgtcttctcttgccaattgtgttattcttttgttaatttcaatttttatcatgtttgaagcttatcaacggatttttgaacctcgagatatagaaagctccttcatgttgatcgttgctataataggattaattgtaaatcttattgggctaaggcttttaaaagggacacatgcccatgctcatgcggatcatacattttctgcatcaacgcaagaaaatgataaattaagaaagaccgatgctcttcatattcaaggtgcgaagctagaactatttagcgatcttctcggatctattgcaatcatcgttggagctgttctcatttattatactgattattatctgatagattctataattagcttcggtcttgctctgttcattatacctcgtgtttggtatttgttacaaagatcaatatccattttgatggagagttctccttcaagtttgttgtataaggacataaaggattcaattctgcagataagaggtgtgacaggagtgttcgatctccacatatggagtataacgtccggaaatattgcattatctgcacatataattatttttgattctaccaaatcacaagagatactccaagaaataaattcactcttagaaaagaaatttgcaatttatcatactacgattcagatcgaaaaatatcatacagttgatgatagggatcattaagtgtttttttattatattagcataaacttgattataatgtcgtcatcattatcggatgaagtagatatttatgtatgcaacctgatcaatattcgtcctcaatggtctctgaaataactatcgcgttggatctcgattctgttttggctgatgtaatgcaaatctggttagaagaatataatgcaatttttaatagcaaaataaaaaaacgagatatatctgattggcacatacataatatattatcaataagtaaacaacagataacggatttattcataatggtctggaaaaaacgatggcaagacatacctcctactagtaatgatctttcagatgtaataaatcaattacaagacaagggctttcgaatttccattattacaaaaagggagcgagttacaatgccatttgtggctcattggctcgatctaaacgatatcccgttcaatgacattgttttcatttttgatgatgtgtcaaagagccattttcctttttttctattggtcgatgattctcctatcaatgctagggaaattgttactcccaaacagataataatttttgatcagccttggaataagtctttagcatcttttacaagaataagcaaattgaatgaactaatcgacttggtataggatataacccttgaccttccattctatcttattctactatccagatctatgaataatctatttaagactgatgatagtccgttatgattacaaaggaaattgaaacattcttcaaatttgtctctatccgaagttggttttcccaaataatctaattctatgtcttccagatctgttttcaaataaatcgctatagaaaatgcttcatcttcatcaatgtcacttaatttgtattctctaagctcaatctttgttatgatcctcccttcgatcacaaatttattctctagaataactttccttctatttaatctcaacagtattgaaacactatgataactaatttaatgtttaagttctctttatgaggtatattattgtccacttatttatagtccaaaaatcgtatccattctggaaaccacagctgactttcatgaacaccaataccttttgccaaaatctcaggagagttgtaaaatactgaatcagctcctaattctgatgctattttcttattcagatcatctatataggatatcttgccaacatattttcgtccaataagatccttttgttgagtatataatccgacttggcggccatcaatggtgggaacgtagctaaccactatatcaattctattaacatttgcttttcttaaatagaagactgtttcaattatggtgcctccagtttgtattgtaccttgaacggataaaatgttattgttgtgggtaactggagtaataatgaacttgagtgttttgccattggatagtaatttgttcttacttacctgttctgaataatctatcattggatctgaatcgtcatatctgtcttttattatgccttcaaccatttcaattttttttccgttatttttgaatcctatgtttaagcctagagccattggtctcgtataatctggttccgcaaagatcatgtcagcgtctatgtttttgtttgatagatattgtgcctgaatgtttccaatattttttcttatagaataaatgctcttgttattaaaaatacttgacacatgtgactcgcgaataaattcgaatggatccattaagattctattcttatccagttgtgtcaatatatccataccgtacttgggactcaaacgaattagctgtcctggatttatttcttttaattttaaatggaaaaaactctctaggtagttctcggaagtaaccataaaaaataattcgttttcatcctttcccagaaagaggggtttaaatcctgtactatttctaaaaacatagatttccttgttaatatttattacataattaccccttaaatgcctgtccaaaaattcagctgctttataaggatctttttgtgccagtagcagttctttgaaaatgtaatgaatttgctctaatggttcggaatttctgtttcttattaaaggatgtgttgtcaatttatctaaatctatgaaaaatccatctagagcaaaatttattctctccattcttttggactttggctttttttttgaaagatgtccaaccgtcgtttgcattggattattcagctgctttacgattttttcatggatggtatcaaatgtaggtaatgagccatatccactgacctcaaatttacctgaactaattttccaaaccgcctttccacgatgttggagtaattgcattccgcggaatacttgataaattgtcttttcgttattgacgttctcatccagtacgcatactgcaactattccacccattaaaattcagaattgttttctcgttagaacgataaaaattttgatatttttccattttttgttcgatcattttgctcaaaatgctaacgtaaatatatattccattgttagctaatcttttagaattgataattggcttgttgggtaaagcaaatgttggtaaatcaacattctttaatgcagctacagattcatcaataccaattgctaattttccgtttactactattaacccgaatatcggtgttgcatttgtaagagtaaattgtgtttgtaaagagttgggtgttttggataatcccatcacttctaagtgtattggtggaataagatatattccgataagactaatagacgtagcaggattagttcccggtgcacactcaggaagaggtctaggaaataaattcttagatgacgctcgtcaggctgacgttctcatccacgtaatagatatctcgggatctaccgacgaagaaggcagaccagttaatccgggtgaaggaaatccgctttttgatttggagttcatagaagatgaatttgatctttggatacgttcattaattctgagagattgggacaagataataagagagagtgaaaatttaaaacaaaggatagaaactgtattgtctaatagactttctggtctatcaattagcgaacaattgatcagaacttccttggataatatcaacttgatcaaaaagccaagcgaatggactgaagaggatttgctcatattaagcaaacaaatacgaacacgttctaaacctattattttagcagctaacaaagccgatatctcgtcatcagataacaatatcgaaaaattgaagaatttaaaaagaccgtttttccctactgtatgtgaggctgaattattgttaagaagagcttctcataaaagtctcatttactatttgcctggagattcgagtttcaaaatcagacaatctgaaacactttccaacaaacagaatgaagctttggaggttgtatccggtatattgcgtaagttcggctcgacagggattcagcaagtaataaatcatgcatgttttgaaatattacaaaatatcgtagtttatccagtggaggacgaatacaaatttacagacaaaaaagggaatgtctttcctgatgcaagaataatttccagtgactctactgccaaagatttggcatatttaattcataatgacttgggaaaagggtttctctatgctattgatgcaagaacaaaacaacgaattggtgctgagcataaattgaaaaatggcgatattattaagatagtatccacaatgagtaggaattaatgcatgctatgctatgtttaggaattgaaagcaccgcccatacgtttgggtgttctataatagaaattgacaaaaaaagtgatgctggcagtgcatataaagagttcattttatcagaagtaagggacatttataaagcatcagcaggatggggtattcatcccagagacgcatccaaacatcatgccatggtagctaccgaaatattaaaaaaatgtctagaaggagctggagtcgggattaaggatattgatattgtttcttattctgctggtccaggattggggccttgtttaagaataggtgctgttgtttctcgatcattggcttcttttcatgatatacctctaattcctgtaaatcatgcagtgggacatatagaattaggaattaaacttactggatctgaaaatccattaacattattggtttctggtggacacactatgttacttatttactataagaataaatggagaatatttggggaaactttggatattaccttaggacagctttttgatcaggtgggaagaaaaatgggcttttcatccccatgtgggaataagatcgaagaggtatcttatttatcaaagggtctaaaggtatattccctcccatatattattaaagggaacgatgtatcattttcgggattacttagtgcagttaaaactttgctaaatgacaacgataatgatatccatgacatatgtttttcattgcaagaaacagcattttctatcattgtagaggcggtcgaacgtgcattagcctttactgaaaataaggaatttctaatagttgggggtgtttcagcgaataagagattgtctagcatgcttgaaaccgcctgtgatatacataattctaattttaattcttgcccgcagaggttttgtggagataacggagcacagatagcatggactggcgctcagatgtatttaagtcgtccatcgagtagtgttaaacctgaaaatgcatctgttaatcagtcttggagattggatagcgtacatattccatggagataacttcatgaattatttttagcttgatcttcaatctgtaatttaatctctttaacccaaccaccgggattcaaaactccaaacttgtatgttttattactattatttagttctatcaccaattttttgataattcttccttcagatcttgcttgtgcaatgtcttttaattcaaattctattttttctccaagtaattctttagataatgttgctattcgacctttggttttttcaaaggcaagttttctagttgttagagtaagaattccactcttcaaagtatcttctgaacagtcttcaaatagaacatttttttcattatttgatgaatttgatgttttgtccataatttttaaagtaataacgtattactaaaattatctattgacgaacgatagaatattattaaaaaaaggcgctgaatctgaactgtacctcattgattggcatgatgttcaggccatttcaaagattcgaattgccaaaatatatcgtaactcatctatcgatattccattgaggaaacggcgaacaattcatgaagctaatattttatcccaagtaaagttttttggggtcaatactcctttcatttattttcttgacataaataattttgaaattattatggaatacatcaaaggaaaaacgcttaaagactttttttcccccgatctttgtataaatcttggggaaatcgttggaacccttcattgtaataacataattcatggcgatattaccacatccaattttattatatcatcaaatggagccatttttgcaatcgattttggtttatctttcttttctgaacgatacgaagataaagctgcagatattcggttatttaaagaaatattgaccagcttccatgtcgatgaatttgatatatctttcaaaaatttctatgatggatataagaaaatatgtggtagtagaacgtcaaaagtatttaaaacggtaagtgaaattgaaaaaagaggtcgctattccagatctgaattctaacattgtatgtaattttcttataataataaaataactattgtataacttttttacacaatcctttttccttatgttgtacaaaatgatcttgacaaaaatcagtttcgcattcatagcaatgccaaccgcataaagtataacatacattgcattttgaaatcggtttattatagtcaaattctttagtttgttttacaattcttggcttttgtattcttttttgctgttgcctcatatatctatcctctatttaagcgcaaaacatcgtcgtgatgtttgaaaattcttctccaactgtgtggatctatcaacctgtttcataaaatcagaatgttatttaagcttttcaaacgataattagggaatttgcaattccaattatttcataaatgcgggaggtgggattcgaacccacgaatccctaaggaacagggttgtaggaaacttccaagctcattctaagcatcgcacaatttctgacctgcgccgttgaccgggcttggcaacccccgcattaccttggactacattaaagccaaatttatctattgttaatacgaatcaagttgaattctttgtttgatgatcttttttttaaaagacctattattcatccccttatcgtttaataattattaggatggtataaatattgatttaactggggagatgttttgacagaaaaaaaactatttggaactaacggcataagggggatatttggaaaagatctgtcgattgagtttttgatagatatcactttttctataggatgtttttttgagaagggaccaatcgtgttaggatatgatggtcgttcttctagttttgcaattcaaaaaattatatcggctgtgttaatgtcaatgggtatcgatgtatatacgatgggcatgacgcctacaccctgtctacaattcactgtcaaaaatttaagatcttctggtggaattatgattacagcatcacataatcctaaagagtataacggaataaaaccaatttcaagtcatgggtttgaattgtctagagatgatgaaataaaaattgagtctatatattatcaaaaaaagttcatgagagagtattctggttcctttgggaacttattcaaattggatgttttggaacagtatatcaacaaggtgctttcttttatagatgccgacagtattagacgatcaaatcttaagattattatggattgtggtaacggggtccaatcgttagtagcccctttgataggaagaaaattaggatgtgaagtgctgattatgaatggctatgttgattcaaatttttctgcaaggggctccgagccgaaaatggataatttatatggtcttactgaaatggtaaaaaagacaaactctgatttgggtgttgcatacgatggggatggcgacagaagcattttttgtgatgaaaagggaattatccattggggagataagacaggatcaattctatcttatcatttaattcaaaataagaaaatggatactacaattgtatgtcctgttaattcttcacttgttatatcaaaaattggtgagttggttgagagagatgtttattttactaaggtcggaagcgttcaagtttcttatggcatgaaaaatactaattctcttatcggatttgaagaaaatggaggtttcttttatggacctctgaatttagttcgtgatggagcgatcactacagctctggttttagaaatgatgagctattataagcaggaaaaactgggacaaaacacaaattgcggtgataatctattggataaaaaatcgtccctatcagatattttctctatgttagataatacatttcaatacaaatccagcttgaatttgtctagcaacgatgatatgcagcatgttttggatttatgtgctgcacatggatctgtatacaagatagaaaggatagatggagtgaaaatatggtttgatgctgagtcttggataatgttcagaccaagcggcacagaacctctgattcgaatctatgccgaatccaatgataaaagcttattagattcaaaagtaaaagaataccttaatttaataaataaaattctgaacgcttctgattgatacatgataacatttttaatactcttttttatcataagaaagagtggaaatgatcccaatgggtgattgtaaattatgagtaaaccgtattatgtaaaatttgagatacctaaagatctggttagtgccgtttatgaggcagtaagacttgccaaacaaagtggtaaggttaggaaaggaacaaatgaaactacaaaagcaatagaaagaggaatcagcaaattggtcgttattgcagaagatgttgaaccaccagaggttgtagcacatttgccaattttgtgcgatgaacgttcatctaaatatgttttcgttcctagtaagaaagacttgggtagtgcattaggaattgatgttggttctgctgctgcaaccataatagatcctggcgaatctcaacaaattcttgaccagattacaaatactattgatagcataaaaaacaagtccgagtaaaacaggtgtattttattaaatgagcaagactgaggaaaaggtcattcctgcagaagtaattcaaatcgtaggtagaactggtatcgctggagaagtaattcaagttcgtgtaaggatatctgaaggaaaagacaaaggcaggattctgactcgaaacgttaagggaccagttagaatgaatgatattttaatgcttagagagacagaacgtgaggcaagaaaaataaagtgatgcttaaaatatggagttattgtaggtggttaaataatgagtaagaatgttgcgtcattgcgaaactgttttttttgtggaagacatgttgatacaggtaaagggataatgttagtcaaaaatgatggatcgatccaatggacttgttcatcaaaatgtaaaaagaatcttcgcgatttgaaacgtgatccacggttgtttaaatggactgataaatatatcaaaggtggaattaggaagcaaaagtgaaatgggggtagagcaaactctaatacttattaaacctgatgcatttaaacgaaaattggttggaaaaattattcaacgttttgaagaaaaaggatttgacatcaaacaactaaagacctatgattttacagatgaaaaagctcaagatttttattcaattcatcaaagtaaacctttttttaaagagctagtttcatttgtttgctctggtaccgtcattgcatgtattttggaaggaaataatgctgtcagcacggttaggataatgattggacttacaaaatcttttgatgctgcaccaggaacaataagaggcgattttggtctgggaataactgataatattattcatgcttccgattcgcatgaaagcttcataaaagagtcatcagtagtatttttataagtgcatctacgtcagcctgtagtagtagttctaggtcatgtagactctggtaaaacctcgttactagataagatgaggggaacattcgttcaatcgcgagaagctggcggtattactcaacatatcggtgcaagtttttttccaatagaaataattcagagtttgacaggtccgttatttaagaaattattatcacatgatcatgctattcctggattactggttattgatacacctgggcatgaggtttttgcaaatttaagattaaggggaggatcagcagcagatatagcaattgttgtagttgatgttaataaaggatttgaacctcagactatagaaagtataaacattttaaagaataggaaagtaccttttgtagtcgcgataaacaaagtcgatcgtattacgggctggaaaaaagggattaccaatttcattaccgaagaaattaaagttcaacctaaggaagttcaagtagatcttgataataaaacatatagtgtgttgggttctctttcacaattaggattcaattcagaggctttttggcgtgttaaggattttacgaaagaggttgcattagtcccagttagtgcatcaagtggtgttggtattcctgagcttttgacagtcctggtaggattggctcaacaattcatgataaaaaaattagaaaggcatgaaggatccgctaaaggaattattctagaagtaaatgaagaagttggtttaggaccttctgctaatgtcattcttttagatggtatcataaaacaaggtgattcagtagtggtcgcaaaacgcaattctgttatcgtgactaggattaaatcattacttctaccaaagccacttgatgaaatgcgtgatccacgggataaatttcgtcatgtagatatggtaatttctgctgcgggattaaaaataacttcccctgaattagatggtgtaatagccggcagtccattgtatggacttgcccctaccgatgacgaagaaaaaataaaaaatctagttgaatcagaagtaaaatctgcacttattaatacagactccaatggtattattcttcgatgtgacactatcggttctattgaggcaatttcggaaatgctaaaaaaagagaacatcccaatccggtccgcagacatcggacagataagtcgaagagatgtgatgactgcctctgcagttaaagaaaaggacagatacctgggcataatattgggctttaatgtcaaaattttagaagatgcagaaaaagagtcatttgaaagggatgtcaagatctttaatgaaaagattatttataaccttgtgcgtagctatactgactgggtatcttatcaaaagaatcatgaggattctatcttatttaatgaaatatttccaatttgtaaatttgaatttatgaaaggctatgtttttagaagaagtgatcctgctgtgtttggtgcggaaattaccataggtaaaatgaaacaaaaaatgtcaataatgaatcctgatggaaaaaaaataggagtaatacatcagatccaggataagggtaaatcaattgaagaagctactaggggaatgcaagtggctgtatcagttaatggacctcagataggtaggcaaattaacgaaggtgatgttttttatacatacctggatagtaggcaagctaaattactattaaatcgttttaataataaattagatgacgaagagaaagtaattttggatcatattgttagcctaagaagaaaatcagatcctgcttttggatacatatagtaaattcgtttttattgtcatctgatatttatatagtgttaaatttgtaaataatataaaacctatgaatgaattcaatttaataggaaaagttttctttgctcctaatacttctgattccgaattaatcgaaaaagccaaactaagattaaaagaacatgggatacctgaagaaacaattgaaattaattataatgttcaagaactaaacgaaggtgatttatatataagctatgatccgccagatttggtattgagaaaagtgtatgccaaaactccaagtggttttattaaaatgaaaagtgtaaaatctatcaaactctaaatttatctcgatctatttgtcgactaactcttgaactaattcatcaaaatccttagttatgtttatcttcttatctgtcttatgaaatgcatctcttaatgttagtttgccatttttttctaaatcctctttacttacaattatgatttttttactcttcttattttctgcttctgcaatttgttttgaaaatgatcttcttgacaagtcgtagtcaactggaaaattgtttctccttaaatacgaggataattgttctatatagccaaatatttcgatagagtcatatactatataattcaaatcttcaaactcactgtgtttatctttcttgaattttccctgttgtttcattgccaaaacaatacgctcaaccccaccagctgccccgatggctccaacttcttttcttccaaaagcatcggtaagtttgttgtatcgaccacctccaacaagggatcctaggttatttcctgtgtctattgcttcaaaaactaaccctgaataatagtccaaacctcttacgatgcccaaattaattcgaatgttgtttattcctttatttgataatgacgtgttgatttttcctatttcttcccagttcttcagttcgagcaaattcatagcatcatctaattccttgaaactaccttttttctctgcaaaattaatcactttttctaagactttactatcgattctttcactatattcttttaacacattggcttttcccttctttggtattttgtcaattgccctgaatatctcaaatatttcttcatcatttgataccttgagaatatttttgatatattcttcaattaaatttctactgctaatatcgataagtatatttctcaatccgagtttttgtagaaaaattgaggtaaattcaattatttcagtatccgattctattgatgaaggtccgtatatttcaatgtcccattgatggaaaaatctgtatcttcctgcttgtggctcatcatatctccaaactccaccaaatgaggccatttttgtgggaatcttcagatctcttcgggatacaaagtatcttgttaatcctatggttaaatcaaatctaagagcaatatttctattccctttgtctacaaaattgtagatctccttagctatggaaggacctgactttgtctcgagggtagataataattctaatggagatggttccattaacataaaattaaaaattcttgcagagtctatgaatgcatttctgatcacattgatgtccttatactcgtcaggctctagatctctcatccctctcggcagtagaaatttcattgttgtttagactgtcaatatttttaaatttagattttccggttcattataatatctatcagtttaaaaagactgcatgtttcttgacagtgttgaatatcttgaccatatgacggacgcatacttacgtatcagaggtcaaaccatgaatgaagcttttgaatattcggcaatgggcttggttaacatcatgtatgatatagaaaatatagagaaaaagcagcggattcctatttttgcagagggtgacgagttagagaatctgttgtttgattggcttgataaaatcttgttgatgatgctcattgataaagtgattttttcaaagtttaaaattgaaattacctttgataaatcttctgataaatacaatcttactggctatggtgagggtgaacttgtagatcttagtaaacatgaacttaaagtggaaattaagggaataacctatcatgaaatgaaaatactcgattataaagatacaaatgaaaccataattgaatatatagtagatttatagcccttcatttaatatgcgttatatctgttcttgcaattctaagattcattagcagatagaatatattgtacaattgaatgcggtttacttatgcctagttcttagacggatacgctttccttcgaaatgtcatgaatttttcattaatgtactaattcatgtaatcgtaaagtcttatatatcaattattaatatagattatccgtaaaaatgactaacgaatcaggatctgcttcttcttctaatactataacagaattatcggaaaataattttgaacgctttatatctgataacaagatcgtcttggttgatttttgggcaacatggtgtggcccatgccaatttatgcttccaatatttgataaactttccaaaaaatacacggataaagtcaaattcggtagattaaacgtagatgacaatcaatcaatagcaatgcgtctggaagtatatgcaatacccacatttgtaatgtttgtaggtggtaatgcggtagatagagcagttggtgcagtaggcgaaaagggattggatagtctactccaaaaaaccaaatcctaacaaatgaaatctatcaatataattacgagttttattcttaaattttctatttatacaatcatattaaaaattgataataaataacatatactatgtaaacttgtgattaattattagaaagaatttattattgacttgatttagatatcatgagataaagtatttgacggaaactctttcttatgatatacttatagtaggatccggcctggcaggacttagggctgctattactgccgcctcgaaaaacaagaatctaaaaattgctgttctgtcaaaagttcaggtcatgcgttctcattctgtatctgctgaagggggcacagctgccgtactatatgaaaacgaaggtgataacatagaatcgcatatatatgatactattaaaggtagtgattttttagcagaccaagacgttgcagaaagacttgtaaattggattccatcagaaataatacaactagatagatggggaatgccatggtcaagacgggataatggaagaatcgatcaacggaagtttggtggctattcttttccgagggctacctatgcccaggataaagtgggattttacgagatgcaaacgctctatgatacatgtcttaaatatgataatatttttttctttaatgaatggttctgtacctccatccttcatgaagggaatacctttcagggatttacttgcatagagatgaaaaatggcaattttgttaaggtgattgccccatcaggcataatttgtactgggggagcaggcagaatctatagcttctctacatatgcttattcttctaccccagatggtttagatatggcataccgtgctggtatggctttaaaggatatggaatttgttcaattccatcctacgggtattttgccatctggaattttgattaccgaaggtgcgcggggagagggtggatatttaattaattctgaaggcgaacgattcatgaaaaattatgcaggcgaaaaattagaacttgctccaagggacgtggtgtctcgttctatgataactgaaatccaggcagggagaggatttaaacatgttacaggtgctgattgtcttaaattggatctaactcacctgggtgcagaaagaattaaagaaaaacttgcaggaatcagagaaattggaattaaattttctgggatagacgtaattgatgaacctattgaagtgagacctgtgtgtcattacatgatgggtggcatccattctaatgtagatggtgctactgaatttaatggattgtgggtagctggtgaggcttcgtgtaatagtactcatggagcaaatcgattgggggcaaattctacttctgaatgtctagtatggggtgccattactggagaattggctgccaatcacgcgttaagtaaaaagactagtattccaagtacggataatcatcaatttttgatggaagaaaagagaatctatgatgggatatttagaggtcgtggtgatgctaatccttatgaaattagaaagaatctgactgacactatggatgaaagatcttatgtttacagaaatgaaaatgatctcatagagggcttaaaaagaattcgtagtcttaaatcgttgagttggaaacacgttgatgatcaagcaaaagaatacaatacaaatttcattaatgtgatggaaatagattccatgatgcgggttgccgaaatagtattgataggtgcaataaatagacgcgaatctagaggagctcatgcacgaatagattatcccaaccgcgatgataataactttttaaaacatactcttgcgtattataatagtgacggggaacctaagatggcatggcatccggtcgtatttacaagatatgcaccagtggagagaaaatactaattggatataaaacctaatagtgggaataattctagtacaggtggcgatattaagctcaaatctggacgtgaaggattaatgggctggttgaaccctactagatatggttgggaaagagtatcttattggctgcaacgtttaaccggagtcggtttattaatctactttatagggcacatatatgaaactagctcattagtaaatgggattaatgcttggaatagtatgctagagttgactcaaacaaccggaggccacatatttctattattggtcataggtgcaagcacatttcatacagttaatggattacgtcttatttttaccgagtctggaataggcataggtaaaccaggacgaccggattatccatattatgcaacttctttgaattataagcaaaaatctggcatatgggttgccatgttattagctgctattgccatgttgtatggtggtatggttatgtttggagatatgagctagggttggacatgacaaacacctatagcagcttgaattattttatggagcttagaatctaatgccgctattaaaattacgcgaaagtcaaataatgaaaattcattatttgacggggatatgtgccgtattctttgtagcaattcacatattatttagactcattatgccatttggccaaagtttagaatttcataacgtagtagctaattatcataatatgtactatgtcatactgttggaattaatacttgtttttatctccattcatggatttaatggcttgagaattattttaatagaactaaaacaaaatcaatggtgggaatccacaataactatattggtgctagccgcaatgattggggttgtagcatatggtactagaacaattattattgggagtcaattataatatgtatcaagaaaatataataccttggtcatcttctacactaattctgaatgttaatcttgaatatgaaataaaaaacatgtgcagataaatatgagtgacgaaactaataaaataaaattaaaggtatatagaactaattataacaaagaagagtctccacattatgacgaattcgatgtgtccgttaaacgatggactaccgttttggatgcattgttagatgccaaatcttattctgacagtagcttaggaattagatattcatgcagaatggcttcttgtggttcatgcggcatgaaaataaatggcaagccccgattagcatgttatacaaaaatatctgaactaaatgaccaaacaatagtttgtgatccactccctagtttcccaaggataagagatttggtcacagattttacggaattcttcgctcatcacaaaaagatggaaccgtacatacacaatgaaaaggtgcctattgaagttgtagataaagatgacttggttgaatttaaacagactccagaagatgtagacaagtatttgcaattctcgtattgtattaaatgtggtttatgttattctgcatgtcctacagtagcaacggatacaaagtttccaggacctcaggctttgtctcaggcttatcgatatatggccgataatagagattctggcgattcaactagacttgacataattgatgatagacacggaatttggagatgccattttgcgggttcttgcagtaatgtgtgccctaagggggttgacccggccttagggattcagcttcttaagggtcatctgatcggaattacaaaaaatgataaaaaaatcgcgacactaaggtcgaaagaggaatagtaaaaattcattaattacctggtgacaggctatttttcactctttttctcatctggtttatctgaaggttttttactctcatttacctgcttgtttatcgcttctgccatgaagtgattgcttacatttacttttacatcgttgatgccttcaactttaaaaatattgtctcttacatcttgtgctattttaaatccaaatactgctggacagaatggactagtaagatgtaaatcgacatcaacttttcctttatcgatgtctactttgtctattaattctaactccattattgaaactcctatttccgggtcaactatttttgtaagttcatcaaatattagacgtctagttagttgtaaatcttgagacatgattaacatatattgtcatcttgcctatttattaattatttaataaatccaaatatttttcgcctaatcaattttattatgttaaaatatccgattaaattaaaatttttgaatgtataggtctaggcccagcggaaatttggataataaagctctatcatttttgtcctcaatagccgacgatgctgacttattttattacgatatcttggggagtcaggctcacgtaataatgttatatgaagttggtatcctggctaaaaaagaactggttactattttaaaaggtatgaatcacttattgacccattccgattcattaaacagatatggtgatagcgcttctgaagacatccatgaactgatagaatctgctattataaggattaccgatatcaattcgggtgggaaaatgcatacagcaaggtcgagaaatgaccaagtgatattagacattagaatgaaacttcgggatgatctaaatcgaattagtgctaatataatattgttaataaaatcattattattacaggcaaaccgtaatgttgattccataatgcctatgtacactcatatgcaacaggctcaattgggtgttttttctcattatttactatcgtattgcttttctttgacccgagacttcgaaaggtattcagaatcatataaaaggatcaattgttctccactgggggcttgtgctatcgggggaagtagtatgaacataaatcgtgaaagagtgtcctccatgttaggtttttcagatattgtctataatagcatagatgcgacaagttcacgagattcgttgatagaattcgcttctgcctctcttacttgtatgttaaacctatgtaagatagcagaggatcttattgtttggtctacatctgaattcgcttttgttttcttggatgatcgatttagttcatcctcttctgtaatgccacaaaaaaagaatcctgatcctctggaacttattcgtggaaagactggcgttatacaagggattttggtagcaatttctacaattatgaaaggactgccatcaggatatagcagagatttacaggagataaaacctttgttatggaaaattacttcaatactcgaagggtctctatctattatggccggtgtgatatctacaatgagtgtgaataaaaacaaaatgtatgcagattcatccaaaagctacgctatatcactagatattgcagaacaacttatcaaaaaagggggaatatcgtttagggagtctcacaaattaatcggtactttagtagattatgcggtaaagaatggaaatatcccgctgaatctattaaaaccaagtgatatatctaaggcattaggactgattgactattcaaatcgtgatctaactatagaaaagattaaaagtataatccaaagtatgactccggaaaattcaatagaatatcgtactaccaaaggttctcctaataaaaatgaacaaaaagagatgatatcatacataactacaaaaatgaatgaatatgaggtaattcttgaggaccgttctaatagattaaagatcgctaatgacaaacttaatttgaaaataaaagaatttattgatgagtcttcataacgttttaataggagattattctctattactaaaaaatcttagatttaaattatcccctcaaattacttatattgatgtcagaagtacactcacaacccaatcaacaaaacaaagaaaatagccctacaagagatgcaatatacatcggtaaaaaaccattgatggcttatgtaacttcaacacttattcaattggcgaatcaaccttctgtaactattaaagcccgtggtttaagcattggcagagctgtggatgtatcacagataatactaaagagaatggaaaatgctggctatgctgttggtgatatcctcataggatctgaaaccgttcaagctgaggacggcagaacaagaaatgtttcaacaatagaaattcagataaaaagaaattcttaaatacctttagtttaatttttctccctttgtgctatggaaaaaaaaattgcagcgatatttttagcacatattaatcctttgactgtttcgcatgagtcaattattcggaatcttttacagaattatagtgtttatatttatccggtaaggtttttgaaagatgggatagaagtaaatacacgtagtttcccattttcctacgaaattagaaaacaaatgatattagaatcctttaattgtcacaaaaatattcatgttcttggagattatgcctttctttctccatacatacaatattttccaccgtttgtatctcctgcatttaaaagattaaaaaataagataattctaaatattcaagaaaattcttttataacctacactggagatagagccgaacgggttctgttatccctctttggttttaatcccgttaaagctaatcgacaagttgtctcgtcgacgaatgtaaaaaatcttttatataaatcggttttatccacagaaaacctaaacccggatgagggatcaaataacaatgatttgaaatggcacgaatacgtttcccctaaagtcggccaagtgatagaagacaattgggaaactataagaaatttttccattacaaaagatgaaactatacgtgttatgggtatgaaattcccaaaaaatgggtttatttaagttgattactgtagatttaacacttttatagaagtaaaaaacttgcaaatctatgaatactaagaatgctgattttatttggtttgacggtgaattcaaatcatgggattctgttaccgttcctattacgactcatgcgttacactacggaacgtcagtctttgagggcatcaggggatactcaaatgatcaaaatctgtttatttttaaacttaaagagcatatgcaaagattgcttcagtctgcagaggtctattctatcaattcaaattatgcgctttctgaaatgtgtacatctactattgaattattaaggaagaataatattaaaaagtcttgttatattaggcccttattatttgttggattacacggaatagatcttaatgttactaagcgctccccttctcatctggccattattgctttcccatttgatagatattttccagaaacagggataagaacatgcatctcttcatggagacgaataaatgagaactctactccaccgatggcaaaagctggaggaaattatatgaattcagtattagctactcaagagtgcaaaagaaatgggtatgatgaatcgatattactcgattattatggcaatgtgagtgaagcaccaggagaaaatatttttctagttcgaaataataagatttatactccatcattatcagattctgtgcttgaaggaataactagggatacggctatcacgatagcgagacatcttggttatgatgtatgcgagcgatccattacccgtacagaattatacattgccgatgaaatatttgttacaggtactgcagctgaaattactccaataataagcgtggataatcataaagttggaaacggaacagttggcgaatttacaagaaaaatctctgactactaccaaaaaatagtgggatctcaaatacccgaatttaatacttgggttactccagtatggtaacttcaatgttattaattctacattcaagaaaaaatagcgtaaatttaggagatgttgaaacaattggatgaaaagtcaattaaaattgcggtaattggaactggtggctggggaaagaaccacgtacgtgtattaaacgatttgggtgtattatctgcaatatgcgattcagacttgaatagatctcaagccctggcaaaaaaatttaagatcaattgctattcaactgttgaacaattacttgaaaaggaaacttctcttgatgcatgtctagtgtgtactccgaccaaaacacactttccgattgcacaagaaataattaaacgtggaataaatgtttttgtagaaaaaccgttatctttctcatcaattgagtgcgaagaacttacaaaattgtcaaaacagaataatgtaattttaacctctggatacatagagcgttttaatcctgctgtgcaggatctcaagcaaattattgatgacaatacctatggggaattattaatgatggaatttcatagggaaaatcgaatgcctatgcatataaaggacgtaggtataatctatgatacttcggttcatgatattgatactgctttgtttatttttgatagtaagccaaatgtcgtttttgctcgtgcaggtaagaagtttcataattctgaagattttgcaacaataatgttaggatttcccaatcaaaaagtagcaataattgtatctaattggattactccaaaaaaagttagaagattttcagctgtttgttctgaaggaaccatcacaggagactttattactcaagaaataaaaatagatgatgagaaccaaacacttattccacgaaggaatatccgagagccattaaccttggaactagaaaactttgttaaatctttatctggtaatattaccaagtatcttgtaactcctgaggatgcgaccgccgtaacaaaaatagctgaggcagctttaatttcgagcaacacggggacacctgtttacctttctttctaatatactcacatatctgctaacaatatgcacattctgaaatatgtcttgaattgtaatgttctcagatgaagataatgtgttcgtaactaatattattttccttgtagatatgggtgtacttcttatctttttcattttggctgcttgatttactgactcagttcctgctccacatctgttaggtaaattcgtattttaagttaattataaatggactgcgatagaaatctaattgaattagaaatgtctgaaaaaaaagaaagttctataataaatttcatttctcctaaagcaacgattggtaaaaatgttaagatatggcattttgcgtatattggggataataccgttgtaggtaatgatgttatgatcggctcacttacccacgtggattacaatgttaagattggaaacaactgtaggatagaaggttctgtttatattcctccacttacagaaattggaaataatgttttcataggtcctggaactacctttaccaatgatccttatcctatgagcaaaagaatgattggggtgatagttgaagatggagcaatcattggaggtagatccattattaaagctggtgtaacaataggtaaaaatagtgtaattgcaatggcctctgttgtaactaaagatatacctccagatgtagtggtaatgggacatccggcaaggataaaatatactaggtcggaatacgatgtaaaaaaaactaattgggatgtttagtatttccttattttcaattttttttactcctgacaaattcatattctagattagatcctcttatgtagatgatatcacaaagcctgaagtaacattgaacgtggatggagaacaaatgatacagatcacaattaatgctttattcatatccaaattttctgcataatgctgatactacaattccattgtgttgaaagtagaattcgcagctactacaattaacttgtagtttggatgacgatggttgatattcttctccattctgtgaattattttcttataatctgcacttgaacaggcaattatgatgttgttagtagaattggggatataactttcaacgtcttcgatttctacttctgcaatataatctcgtagttttgattccaataattctcgaataattgttttgtctcctcttatttcgtgattatcaatcgtccaaaaaatagtaacctttgttctactggcctttatctctctggattttagttgacttcttgtttcgtcaaccaaattttttatgaatccttcgattgaccttattgtcccatttactacatagcttaatgctgtggagctggatatagacaaaccaataatccttagatcgaacaagccatttgctatttcatcaaaatatattgattctacatttttgtaaaagatttcttgtttatcttcttttgatttacctaattttgaaatttcattgatacacgttaaatttgaatacttgtttatgatattaatcgaatatactaattctgcagatgttatacttgctaacttgatatcattttgaatacgattgttctcattaatcaaatcaaaaatgctatctataaataaattttcatttctttgttgatgggaacctaatattatttcagatgtcttgtctgaatttattggattataataatatgtaacatctgttccaaccattaaacctgattgatgttcaatgagtgtgattatttcattatttcctccaatacctaatggaacattaattacaatcacagtatttttcattaaataggtaattatctctttaaattttaaaattatttcattctttacatcttgattgacttttcttattctaggtgcaaaaaagactattggagcattactaattgctttgtcgaaaggttctaaatttagcagtagctcctcctcatttaagaagttaatatgcgggtattcttttacaatttcagaagtgagaataattcccaacctagaattttcatcaataataattacctttgattgtttgcggagtatcttttttgcaatttcataaccctcagtgctcaacccataaatcacaataagtttgtccttcggatcactcttttctatatccagattttcaatattctttccattattaagatatgtataatttgataattttttaggttcttcaccaatggtgtcatttggtttagctattttgtctgaaattctctacgccccaaatatcttaattttagatttctttatttagttttggatttattgatttttattgcaatttcgactaattaacgacattaaaagcgaaagaattttttaatattaaagaataattctaattgtgaagatttggtttgacattctgactcccaaacaaataatgttttttaaacctgcgattaacatattacaaaaacagggtcatgaggtcttatgtacatcacgaaattatagagaagccaatgaattatcacgattaatggggttgaatcttttgatgattggtaaccatggaggatcagatctttttgataaactctttcaaagttcaaagcgaattatggaactgactaaaataatttcaaaattttcacctaatttggtgatcagtttttcatctcctgaagcttcgagagtttcttttggtttgggaataaatcacattggtttcaatgattcaccacatgctgaagctgttgcaagattaactattcctttattaacgacgttattttctccatatgtcatacctatttctgcttggaaaaaatatggcatatcatctaagcaaatcattcggtataagggcttagatcctgttgcatggttgagccgagacattgatgaaattaccttccgactgcacggtaggaaacgacctcgagtagataaagattttgaattcttgaaagagttaaagatagatcactcgcgaaaaactatcctgataagacttgaagaatcaaaggctgcctatatatctaacaagaatttgcgaatacgaccattagatttagtagattttattgtaaataattttgctgataataatgccatcattattctatgtagatatccagatcaaattgcagaaatgtccaaaagattcagaaataaagccgttgtattgagacaagttgttgatggagttaaattactaaataatattgatatttttgtcggtgcagggggcacaatgactgcagagtctgcactactaggcaaaccaactatttctatagccccaattcagttctatattgatgactatttaagaaaaattggattagttgttcaagcttctagtccagtacaaattgataaattattgaaatcattcttagacgacgagcgagaatgcattttaatacaaaaccgtgctgcaaggattttaaataaaatggaagatccaattgaaaaactcgtaagttatgtatctacaattgataaaaaatagattcgtaaaattaataacgtccgtacttacaatataaaaatgcccggaagcccggtagtattacaagtgccgagtgtagtggccaagcatagaggcctttggagcctttgaccccagttcgaatctgggccgggctatttctatgaataaactaataaatatattctgaatttctattttattgtgctgggctgtcatcctgataactgctaattgatctttcttaatccaataataaatctgaaactggtttcaaagatacacaaaaaccaaatgactagattagaaaattttgcttactagtaggacgaaatttaactggtgttaattttacttgatcaaaacaatttcatgaaagatatctctatgacaatcctgaaacctatagttagtataatcgattacatcaacaatatgaactgtgattacctttgtatttatcataaccattatatgagtgagggctggtctgtacttccgtaaactaacagtgttcgtttagatgtcacaactttagctaccatttttctcatgaaccatggttatgagttacgccaatctcatgttgatttctgatgatgaaaaaacaagttatatagcataatacaaaataagcgtattgaactgcataccaatactaagatctttctgctaaaagatgaagaatatattgttccttaaataaggagattaccaaattatcacgacattgacatgagaaaatgggtacatcgattcgattaacacagtatcgatggaagcataattggtttacatatacaaggtatcaacgtgttaaaataattcttaatctaataacttaattaatcaagcaaaatattaccatgattacaagtatataatttttaacgtactgggcctaattcactttgttaaagatataatattggatataaaatttaatatacaaccattaattatagaattagggaaatatgcaaaactcaccagatcattagttgcggttgtatttctctttaggccaaagattgatgtttccttccctaaacctttctttacaactagatgtttagtttagtttacatacgattctattgtaccaattattcttttatattaataatgatcatatgtattgactattctacaattcgtagtacagtaactgttaccctatatgagtaacgaatgcccgttaataaaaagctagatagcacgggttgaggctattgagtaaatagttactacagttagatattctaacttgatggttgtaatttacataattacattttcccacagtatatgaatagaatggcgttttgacaggtaataagtcggaattctaggtcacgcgtttcttcataagctcctccttcatagctagtaatagtgattattttttctcagctttcctctaatactgaagagagttgtatttattgaattgataagcatcggccttataagcatcggcgccagaaaaatatcgataacatagagacaagtctattcatcaatttagtattttgtagaaaccgaactattggtaatttaatttaacctccaaaatcaattgaggtatatgtgatagaagtaaaatcaatagctagagttgaaccatgttccattcaaagaataaaagctggaggtcctagcacggttggatgaagacaatagtggacatacaacttatcaatggactcaaccatttgaactaccactacattttttgttatattcacatgtccagtcatatactgctttacctatatcgttcattttcaaaggtggagttgtgtatcaaaatagttaggtaaaggtgttgtggtatctaaccgaccactgttagtttaagcaagaatatagatcatttttcacacaacttttaaccatatgattcatgctcatagcaccatttccacgatttttttggtagttctactatgactggatgtttgtgattctcaaagtgtttcctagcatgaagcccgactgaagaatcacaacaacctacatgaccgcaagtaagacacattcgtaatgcaacccaattctttccttcattttggcattcttcgcatcctatggtgtttgggacccattcttttttgttagatttatcaatatgttcacatttttgtgtcatatgcgaatatgaatatcaatgaatttaaacaatcactcgttgaattccaatttttgtgaattgaatgtatgcggaaataaacttgtgtcccttatctttgaggtatgtaatcagtccattggatctgaatgattcctataataccagccgatcctttacatctccgtcttaattttagactttaagtagtaataagttaccaactttatatcaaattgatcatatactatattttgaatccttgtatacaagacatgtggtgtggtgttactgtctgaaacttgtttttatatatttcagatatagttttggagatttctctaacctagaggaactaatgtatatatgatgtcacaaattaaaatagtctaaaattgttattctttctgtagttacctctatttctattcaactgaatgattgaatgattgatttcaaccaattttttgaatattgtttgtttttgaaaattcaaacccttgtttaatttaatctttcaggattagaacaaccaaaaattctagaattggcggctcagacccccgattggacttgacaaaggtaatagagattaaatagtatgtttcacatgtcttgatattatgcctcaaaataacaacaaaaacggtaataatagaggtttagcttcagctagcgaagaaactagaacacgagtagcaagggccggtggaaaagctcaacatgatgaaagaggactgcaagcagctagcgaagaaactagaacacgagtagcaagggccggtggaaaagcatcacgtaagaatacataatcctattcattgaagggtttacacccgacttactttccttttattcgatgattgtaaggctctcactctatctaatacttgtacttaaagttttgactaaatatgtactagattgaggattaaaatctgatttcgttatattattttcttattttttcgtctactaattgtgacattagtattaactatccatttaaatatttattaaatttatacagctgactaattttgaatgctcatgtagccatatcttagtaaatagatttaagaaataattgataaaaaaatagaaaaaaatttatgtttattgttgtccgacagcgttactaccggtgttattttgactttgtgtgtttgcgttgtttcctgaaccagcagtgttgccaccagatactacaccactaccttggttagaagattgtgattggcctatgccttgagtagctgaattgccaccactaccactgccaccttgttgtgcagctgcgttgtttccagtgtttgtttgactttgtgtgtttgcgttgtttcctgaaccagcagtgttgccaccagatactacaccactaccttggttagaagattgtgattggcctatgccttgagtagctgaattgccaccactaccactgccaccttgttgtgcagctgcgttactaccggtgttattttgactttgtgtgtttgcgttgtttcctgaaccagcagtgttgccaccagatactacaccactaccttggttagaagattgtgattggcctatgccttgagtagctgaattgccaccactaccactgccaccttgttgtgcagctgcgttgtttccagtgtttgtttgactttgtgtgtttgcgttgtttcctgaaccagcagtgttgccaccagatactacaccactaccttggttagaagattgtgattgaccgattgcttggttagctaaattgccaccactaccactgccaccttgttgtgctaatgcattgtttccgctatttgcttgattttgtgcatttaaattgttacaagaaacaaaagttccagaacctgatacacatagagcattttggttagaggattgtgcttgacctataccttggttagctgtgttgccatcgtcatcatcgtcatcatcgtcatcgttgccaccactttgtgctgctgcgttatttccgctatttgcttgattttggtcactcaagttgttacatgaaaaaagggtgccgtcacctgatacacaaacaccaagttgagttgaggattgtgattggcctataccttgattagcagtattggttgtagcagatacattcatggtcattgaagtttgacctaaaagtaatacgaatgatattgctaatacggctgaagtcgctaaaaatttatttacagtaatgaaactattcatccgatctttattactaataaaagtatataaactaatttatgtaattattgaatctaaagatgttttatatgtattttctgttatgttcttccatacatcaagaaccgaatatttcattcatcatggaattctagtatgaatcagactcctgaatcttatttaatcaaaaaataattgttgtaattatcaacaggatatattttatttggtgttttcatcctgtttgatatttctattcatatatgacggcctttttaatttcatatttctgaaccgatccattcttgaagttactcgcgtctctgaagcggaataaggatgtggtattactaaaactctttcaatggatggaaattgagaactaatcaccaactgtatttttaaagatagcatttcgacttcttctaatgattccttcccatcaactgctatgtgtatctctgcttgatctatcatgcccgaagagcgcagcaatacgtctcttacaactattttttcatcgctaaattgttctgaaattatgttttttattactactgttaatttggggttttgccatgagtctatgagtatcaaagatgattttttaagagatatatatgaaactgagaagatataacacgctattatcattgctcctattccatccatttgtacaaacccaaattgtgtggcaacaagtatactaaagaaaccgataactgaagctgatccatcttttatagaatttctcgcatctgtctttagtgaaagcaaattatatttgttagctataatacgcatctgaaatgctctatgaagagataatgcacttgctccggctaggactgccataacaatatatggatgagttatttcgtgtggatgaattaatgcctgatagccattataaagtataactataccaatcactatcattcctattgcagcaactaatgctgtaaaactttcaactttatgatatccaaaatgaaactttttgtcagccggtctatgtgcaattcttaatcctaataatactataaaagaaatggctgcatctgatattgaatctaaaccatcagcggtagcgactacactgccactgagaattcctgtgattatttctacaatacctatagccactaaagttataactgaggtttttgcaatttttttgcctgcaatgattccttcttggactaaattgggcgattgctgtgtattagtgccgctttttattagattttccttaaggtccgcgagttcatcagtagatttattttctttactatcttcttcatcgtccaaattaataatttattctagtatcttacttacactatttaaaatttgctaacgagtctatcttcgtaaaaatttttctaaatatataatcaaaattaacaatttattagtaatattttactaattttaaattattttatacgttttttgactaatactaaataatctaaagaccgtgctatcatttagtagtattggtaatattcttatttcagtttacattcgaattggtacaatctttaagcttttgttgatagtgtataagtcagattgtctgagttacttttgcataatacatgttagatatatttgtggttctattattctaaaatgggatcagccggatttgaaccgacgacctccagcgcccgaggctggcatcataccaagctagactatgatccctcctattttcatattatactaattatgcctgtggcaaaagtatgtaagtaatgttatcagcttttaatcctttgtttattaattttatgatcaagtaaaatcaagatcaatttcatacttacaagcttcaattaatttctggtcaaaacatgctacttgagcatccttgtggttatccacccaatcatttcttaaaatccctagttgaataagtttaaaaattattgaataactaatggggaatgcacctgtggctcctggagaattgtaatttaatatatgcaacatgttatttcttaacatgaaaattggattcattacaaaatcaccttctttgtctatcaagtttgaccgaattccagaggtcccacgaattttaaagtctctatcttctataatgggaagaaatttcttaactctatttatcatatattttttagaaatgctacttaatccttccttgtagattaaattgagcatttctctattaaataacgttctttttattttactattttttctattcataagtttgtatattttgggaagaaattcctttatgttaacgatcttgctgtagccatatggtgaaaaaaccggacatgcattgggtcctacttctctatttccattagctctaattatccagtgaggatccagaaatggatattgttggaattcaggcactgaataaatactatggtttgtgagtttgttatattttggtggtgctatccaatattcacctctgaaaaaaagatcactatattgatggattattttagccatatctaaaatattaatcgcattgcttccagcggcgttgatcaagaaatcacatttgatttcttttatcttgttttcgaaaaggttgatatattctaggataatttcaggacttgaattacttttatttttaatgtttagaactttagatcgcgttatgaaggatacttgatgattttcactgcatatctggattgctaatctttgggtaatttggccgtaatttaccgaggcatctttatgacataagatcgctgactgacatttcagattgggttccaaaattgatatctccttttcatccatcatcattatttccttttcatccaaaccattttttattccccattccaaatgtagtgaaagtgtactcaatgctttatcatcatttgctacttcaattactccatcctctacaaacaaaatcttgtttgcttgacaatatcttttccaaaaatcataaccatacaaggcagctttagcccaaattttcttcttttcaggattgtagataaaaggtgcatggaccttgccggtattcctcgaacttgtatgcaaacctgccattttttcctgctcaattattgttacctttgagcttgatagagtagaaatagcatatgctaaagttgttcctagaatacctgcacctataattataacatggttattatttatggtcagacactctttcctctatctagtattattcttatactccggtcatagttactttgcccatcatcaacgattggttaatctcatttatttcatgacttttatgttttcttctttctattacataccctgatttagaatgataatatattatcatgtccgtcggataaaatgaaattattgaatggttgtcagaatcagatgcaagatgtcgaaggtggatactttcccattcaaagagtttgtctatattgccatcaaaatggaagttgcttccacaagcacactgaacatttctccagctttccttaatatttcttaaccatttgtccttttttggcactacttcgactttttcaatgttattctttttacccattatttttgaattattagatagctgcaaatcccttttctccgcactcttcaaatacaatatatgatcttcttattttaaatctgtttacttttatgaacacccattatcacatctattagtttttttgaataaaatgcctcaatccaattaagatatatgatctcctctgaggctattttgtaattctttaaaaatatatttttttaattcaaaaataattcgctatttgggtaaatcactgcttttcaatgtcattttggccttcgaatagtcaagaccattccactctatatggaatccaagcgacgtgagtagattaatatgtattttttcgggtatttttttggaatctaaaatcttacatgcttcgcccaaattaatgacattttttatatctttccaaatcacttcaataaactgcgttttgagaatataatcatcaatcattagtagtcgttttttggataactcactttcaaatataaacttgaaatcattattcttatctatcaactccttaaggctcacttttaagaatgcatcactagtagtgcaacatttctttaacttttcatctaggtcacctaaatacaaataatttatatcagaaattctaaattcttctatcagtccaatcatattttgaatgatcttgttctgattctgtgtattgagaacattacgacttatgtaaatgttttcaatatctttaatatattttaatatctctttgaatgaaatcttatcgttcttgtacgaggttattaacacattcctattatttttaatatgagttatcttatattcttcatttaattcatatgacatcaaattttcaagattgatcacaaggatcatgaaaaatttatcatcatgagtcttgttttgtactatttcaaatattttagttattttcctttctaggtattcttttgtccagaaaccaatgatctcaacaaatacactattgtcaaattttgacaagacaaaatctggtataaaagcagttttttgttttgttatcataggctcaggttctcgctctatagtccatcctgttttaaatagttcaaatttttgtaagaatatcttttctattttgctatcaaaaagcattggcacattagaattatctatgaaattcctgatattgatttcttgcatgtttaaatcctttctatctttggaattatattcatcctgagatttcttgtacatttgaaaaggatctttctttgattcattgtcctgataaaagggattttctaagtgcattttaatcattttatctgaaggaaatgattttggataggatttttcagaaatttcaaattcgtaaactagtttctttccactatttgttaccctgagaatatctgcctgtaggtgccatctttctgatttcataattgtaggtattatttttgatattgcgctaccgtatctatcagtcaattttattacatttaaagcaccttcaatggaacaaattatcgtattttctttagaatcctggtttgtttcatctaccacatctagccagtacattagaccaagtctttttacttctctgagtacttctttccatcgagtccctagatttaggttcgaccctaaacctattctaatttttagacaaccaaaaagtaaagtttgaatcaacgatacattataagaaagcagtaacttatcgacactgactggtacaaatgtacccattatcatgttttcatcaagatcagaccacattccttttgataacacctcattggatattcctagtttattagatattttctcaagaattgctttccttgtttgctcacttacggcgatattctgtctggctgattcatcaaaaacgcttcttctaatatccatggcagtgaaattttctaaaatttcgattggttgttttgactcattatgatgagggtcttttgagtgaacttgcgatatggatttaaatgtacatcttttttctaaaaccgaggctaatcccctaatgagcttatagtcgttataagtttgctccagacccttaagggactgactcaacttttcttttataacgctatgttgataggaatattcaaaaacttgtatgagttgtttagctatctcgacgtctttagagttctgttccagagaacataaaatgggatatattttataacttttattatccaatttacatctgagtaaatctgaagatatcatttcttattcactaaccattttctgatcatcagactcggaataatagatgatattgtcatttagtactcattgatctgatttatctattaattgctttttattgcttatccctttatttcttctgttgctagtaaagatttcactcgtatcggatgaaattatttcaataagattagctacgttttcaacatcctttttaggtctgagtaatcttcccagtctttgaacaaattcccttttgcttcctgtgccgcttaatattatccccaagttggcatcaggtacatctgttccctcgtccaacaccttggtggtgactataattcggtataatcctttcttgaatttttctaagatttcattcctttcttcattctttgttctatgtgttatgaccggaatcaaaaatctgtctgaaataatataggccaatttagtatgaaccgtaaaaattattgttttctctgtagtatgacgttttaatatcttttctaattctacaatttttgcatagctatttagggctgtatctacagcttcatttctcaaaagtaaagcctttctaagattgctattgttagcagataggataattaatctttctagtctaatgggatagaagatttttgcctcttttaacaattggttatattgaaaaattcttcgtttatatcgtaaaatttcgtctggtaacatctctaccttgatttttttcaatctaaatttggctagatggttgtcttgagatagttcataaaaatctttactgaacactatctttcctactaatttgtaaatattcacatgtttgccatcttctcgctctattgtcgctgttaaacctaatcggtaaggagaaataaattgttctccaattaacgaatatttatcagaagccaggtgatgtacttcatcgaatattaagaattcaaatttgtttcctagatatgatgattttaggtatgctgagtcatatgttgtaattgtgatactttttatgtcttcattgccacctccaagcttgcctatctggttcttcacttttataatattttccatggcttcaaaccattgttccattaaatttagtgtaggaactattacaagagttgaggtatttgttttcaatattgcatgtaatgcaattattgttttgcctgcacccgttggtaggattatacaccctttcatattatgtgttatccatcttttccaagcttctttttgatagtcccttaattcattagttattttgaattggttcctattgagcggaatgatgtaatctcgtactttatccataaaatcaatcttatttcttctgaaatagtgaattatttccggatagtagatacctagggcccgatatctattgattctggggtcaaatactgaatatggggtatgaaaatcgccatttaatagaatagtgcccttatcatatattagctcagtcacagcattttttttatatgtgatatatcaagaggtttttttatttaaatctattttcagttcccaataacgctagattttctgcgtttatatcattggtctcatcctatttcaatgtctttttctaatatttgaattaccatgacaattcattctgctccatccatccgtcttatatattaaaagcttttggtatattattccaattaatgagtaaatagataaaattaaaaggatagtgaatgaaataattattgattacataaatgtcaggtgacgaaagattatcacaatttttaaaagaaggtaaagattgggaaagaaaacctaccaacatagccggcgtttttttatttaaacttcctgaatatcgtggcagaccagcatcgatagcaatagaaattaatccactcaattcaaatggcactcccagtaaaaaaagagggattgtaatcaaatcactagaagaattaaattccatcttggaattaattagtaattctaaggttttacaattagcacaatctattgacagtgttaaccctgaaaggaaaaccatggtaaagagtgaatcaaatgaggtatttgagatctgaatattgataagttcagtcctataccaccattactagccttctctgatatttcataatccaactttggtcaagaactattttgctcatcctctattaagggatgaaattattaaatatagacaataccaggaggacattgtaaatagggcgctatataagaattcattagttgtgatccctacatctttaggaaaaacaattgttgctttattagttagtcttgacattttacttaactggaaaaaatcaaagattctaattcttgctcctactcgccctttggtgtttcaacattttgaattgttcaaaaagaatacctttctttcagaccaatgcattgccttaacaggaaagataggaccagaaattagaaaaacaatgtggaaatcctcttcgtttagggtgtactttgctacacccgagttggtaaagaatgatatccgagatgatataattaaaaaagatgaattttacttaattatatttgatgaagcccaacgagctgttaaggactatagttatacatccatttctaaacgattttacgataattctgatcatggtaaacatccactggtcctagggttatctgctagccccggagcaaaagaagaaaaaatcaaagagatttgttcaaatctatttatagagcaaatcattgccaaatccgaacgagatgatgatgtgttaccatatgtttttgatactaacatagagcattgctccatcgaaatgaatgattatcataaggatctctcagccatcttgaattctttgattaatgacaaaatcatctggctaatcaataaccgattcataagaaagaggaaggttgaaagtgtatataaaaaggatctcttgtcacttggagactatataaaatccaaactagatccaaaaaatatgaattttttcttacttactgctctgaagtttcaatctttatctttgatcttgttatactgtcgtgatttagttgaatctcaaggcagttttgctctcaaaaaattcttagacaatgctaaagataactccgaaagtaaaacttatcaggaactatttttggattcacgaataaaaacaatattcgaaatattaaaggatcatattgatgaacctccacctaaattaatcaaggtgttatcgatagttagtcagtttcttaatttaagagaagacatgaaaatatccagtaattcatctagggataatgatgataatattaccaaacagggtaattcggattacaaaggctgcgaagacaaactgatacctactaattatcaaaaaaagattttgattttttctcaataccgtgatacgcttgaagaaattacaaactttctaaattacaatggtataccttgtcaaggattttatgggcaatcaaataaaaatggacagaaaggcctcagtcaggataaacaattatctattcttggtgattttagactgggaaaattcccggtacttgttgctacgtcagttgcagaggagggtcttaacatccccaatgttgatcttcttattattttatgaacctgttccaagcgaaattaggtttatacaaaggaaaggaaggacgggcagattttccaatggaaaggtggtcattctaatttctgaaaattctatcgatacaaaatatttggagatctcgaaaagaaaagttaatcggatgaaatcaagtcttcagaattcaaattttacttttgagaaacatgacaagagaactttcaaaaatccagacaaaatgcttgaatctgaactcttttttctctacgatagatctaaaaaatattctgattttgtagataaagataattacaacgaaaatattaatcctattttggattctattacttcaaattccaataagaagattaaaagtcttgtcaagaaactatcctaccgtcatagtagctccaatgattcagaattatctgcaccatttacaaaaaaaaacttagaagatctttatgaagtctcattgaatttggatagaaagaaattagtcgagcgagttcaaagacaaatacatgacttactaggaaaagctgggaaaagtggactagaagtttcatatctaaatgaggtaataggcattgatcatgagattattagaaaggcgattgaaaacctagccaaaatgaagagaattatatgggtaaataagaattcaattgcattaatcgaatctatcaaatttctatctggaagtaaatattctgtatccgttgaaaagattgtaatgggtaaagctattgtaatcgtaaatgaaaagtggtatgcttctttggaacccaaggattactttggtcctagggcgatattaaaaaaaggtaatactttccatattattggtgaattgtatcgacgtgcaggaacacttcatttaattgtaaaaaaaataatctagctattgatatggtatattgacaaaaccttggtcctaatgggtaatcatactataaaggtgaaacacttggttgaacatgattattatccatccgaaatccttatgatatgaaacctagtatgaacgccaatatggaaccaaatgttgatatccaattccgttctttatgagcttttgggattatgtcgcgatatagcatgtaaaatataccacttgccgatagagcaagaattatggatataataaattgcattccctgaagaaagaatgggcctacaagtcctaagattatgggtatgatggatactatgccaatcgcacctaaccctttctttgggttattattaatagcggtctttcctgtcatcatttctttatatgatgcaattccttcaggaatattttgtatccctatgataacagctaaagcagttattggtcctgctgctgatgcggctgtcgacgctccaattgctagagactctggaatcgaatctaatcctattcctagtaatatgcctgcacccccacccttttttcagcaatataatctgcaacagtgatattactgtttccaaagcaaatgcaatcatggttaaaaccaatcccatatctttttttgcttctaaaactatttgaaaaatcgctgcagccatgagtaatccagcactaaatgcagttaatgttagtattttttattctgaaagttgtaccttgtgagatatcagagcacctacaaaggatgtacatcccgcaaacgcagtaattgcaatgaccgttattacattagatatttctatcgtcaatctgatggactattggtaatatttctcaatctaaaaatctttcattattcaattatgtattttttgaagatcaattggtctagttttattccaattattgttaaatttctgctatttgaatggaaaatactacttagtatgaatctagttgtattactaatatttactatttatatgtattagacaatcaaacaatcaaacaatcaaacaattaaggaaatcttgttatttgccattgtgatttcaaatatataatcatccgacatctcgagattatttctttgtctctggtggatcatatcattctggaataatttgataattgtgggtagataagataattctgatatgcttagtcaaggtgttcaaatatatgttgcatttctatgaaaaagatttaatctttacccatacatcaatcgatgacttggaacgttcccatcttctggtcctcctcctcctcctcctcctactccagcggcacgctgttcctgttcagctttgataatttgttctagctgttttttcaatttttgtccttgttctctcaattgacttgtctcaatctttagtttattgtcttttatgaaattattaaaggattcaatcaatagggaggcgccttcaggatcaggaattccgctcgaagatggaatgagaattgcagcgcatggaatttgattagataaacaagcagacaacaatccgcctgcaatacctcctatgaatgtagtgtactttttagttgaatcttcaatcgcttttcgattgaaattactttgcgggttaaatccatcatccaaggcatattcggtttcacttcccttgtctttttttacttcattatctgtatcttcaatttctttatttgtattctgttccatattctcgcttgctaaaatcactgtttttctatcagaatccggtatgccttgaacaggaattccatctaaaaccattacttcttctattgaatttttcatcgcccaatccattactgcatctagaacaaaatgtataccatccatcattataggcgcttcgcataccaaaacgcaaacatttccttctttgtttgcatatagcctaaatggatgccttaacttaccatcaataaatattactccgggagatatataatgggattctacaaatgcaatctgatacatttctaatttgtcaattatatagcttgtactaattgaaccgactagtccaggccctggaaatccagcaataagaattgttcggtctttttttaagttatttaagtctgcaatagtgataatttttgtcgtaatcggagttgtggtcgcagtttcactactacctgataatgacgaagacatagaattcattaattatctatacctctcatatttgcttattaattaatatagttattaatggttatatgggagaaactttgtactagacatctttgggttgtcctatcgtggggagattttttgattcttcgttattttattttagaatctttgttagtatatgattcataccttctctgatatagatttcgtgtcaaacctttcactaaaagataactttgtagttgaacacctgttgaaataaaattatatagatatcaactcagtttgattacctttatgaaactaaatggattcagttacacaatgttgttattcccatatattttccttgaaagtccattttttattaaataagaaattgctaactgatgctattgtgactcctattaagagtgaaacatcatatggaacacctgattctctaagcatataaattgacaaaaactgtattaggatgcctaatgaactacatccaacgaacattccgtattgtctaataaatcgggtcaaattgacatttttgtcttcaaaagtccagaatttgtttaataagaaattcgtggttactgaaactgctatcccgactgcagtggcttgtaaatatccaaagcttcccaagattccatttgataaaagaattgataccaaataattcaaaacaaagccgctagctcctaccgtatagaacctggccgcctttgaaataaatcgaaccgattttctcttttctaattgagtgttttgtttcttagatttccttccatatcgatagagtttccaaactgccttaacataatctaaaattattggaaagctaagtttactctgtccgtattttcgatccttaaaggtatagggtatctcttttaccttgatggtgtttttcttctttattaaaatttctaacagtatcttaaacccgtcagtattaaattctatgtcgtgaagtgtatgctttggaaaggcaaaaaagcctgacatcggatcataaatgttttttaaacacaatccatgtctagcaataaaatttgctccagcactaagcaagaatctcttaaagggcatccccttgatagctccgcctgtaatatatctagaaccaatgatgatgcaattaggttccttctttaactctgatatcattctatttattacctctggaggatgtgaaaaatctgcgtccataattaggacattttgtccctcacttgtactgattccgttcacaagggccgagatcaagcccgtcttttcttttctatgaactaccttaattgagatgtcttgtactgatttgtctctacgtaaagtgctcatgttagattcaatatatttttcgactattagaccagtcccgtcaggagagttatcgtctactattatgatttctacaatagttcctgaaggtatatttgattgaatttgattaagtaattccttaatattcctagattcgttataagtaggtatgatgatagatacaaattttttaaattctgtggtttttggtatggtatcatttacatttagcatcgtcattggtaatccctcatctcacacctttagtttattaaaatactatataatatatgcgattgttttctaatataaggatgggtttgttagattcaaaatttggtttccaattaaattttgattgtaatctttcacttttattttatatgttttcactaatggattcctaattactattaaatgatctttatattttcatcgacaaattatatgaatctaattatcttatttacaagacagcagataatttaaatgacaacatgtagtttgggtcatctttttttgatgatattctttttgtgatcgattggcctttcatgatcgataaagtcttgactaattttgctaaattgttgttttaattgatgatttctatgatatattgttatttcctattaaagttaggactgaattacataatatgattagaccatgttatttttcatcaatgttaaattgttgtaataacctcggactatctacaacaagatcatgaaatttatctatctcaatagtcttaatcggatccatcaagataatttgattattcgatttgacattactaagactatctttttgatgcaacatgagtaaatgattttttatatctgtggtaatatcagtattgcaaattttactattattaattacattaagggactcttgaagcattccttgaatatgttcatttcctttattttcatggaagtgggggtttcttgtttcaacctgaaatatttctacaccatgctgtccgatatcaaatgatttattggaaataatgcctccatatttttctaaaatattaattagttcatatggttctactgaatatccactagagaattctaagttttctgcaagcgacatagaaagtgagtgttctccagcatttcctgtagtaatgatatctctctcatatccggtaatataggagatcaagtcatttaggtatttgttactgtgttcagatattcttccccatttcggaaaatatactttgttgtttgctatttttggtttagagtgccagcatattcttacattacacaaaggagaattcgacatagcaaaacccgctgcaaaaatcttgatgtactcattcactgctccaggaaaataattgtcactgtctacaaaccctacatactctttcttaagcaatttggataacaagatccctattatcattccttctgctttgccttgacgaacttgattgttgagatccaaaattgaaggataattaatcttgtggaaaattctactaaggttgggatccgtttgatgtattgtaacaatccttttgtttgaaaacagagaatactgcttaaccatttctacttccatagcatatttgtcaacgggatgtctttggctgtttgatactatgattattagacattcgttaggaataccacttaaaacaccttccaatagactcaatttttcatccttaactggaatcactactgccatggcttgaaatgtctttgataatgtgttactgtcaaatgcaatggtcgaactgttaagctcctgcgaagtggtactaaaatcatgtcccgaatctatttcatatattttttgaagtgagtgaatctttacagcacctatagtttcagtatatttaggtggaaaatctaacctcattatccctaggcgtatgtatataaatgtttaataatatgatatattctaaaaattcattctacgtttccatgggggtcaaatatttaacttttactattgggactagtccttcaaaatgatttagattttctttggactttaagatcaatcctaatccaaataggtcgaaattctaatttaatcattgtcaccatatttagttcacttaccttggtcaattttaatatcctttatttaattatctgttactttatccaatattttatccctgtgattagggtaattgcaaagaatggtactaaatacttgactgctttataacaaagattaaatgatgtactctggagcactgagatctttgttagtaaattcacaattcagtgccaataatgtatcactatgtattatctcatagtatccgtcattagggaaatgattgaacaaattgagacgaattgcttaattgttgtcatagttgacaaagtactgttgaattggttcgttgatttctatatttctacaaactattaattgtcatcaatcaaaatgttatcatatttgaggattgccgtcaatcttatatttattatggttaaactacgaatatgaagctttttcttacaccattatatgttctgtttatatcttgtcgatcttttttatcacaaattttttggtttatataatcaattcgtctttcgcagcaccgacctctccggtgaatccatttggatggggagtaaaactttaccaaatgcaagaaccgaagtaacagcatccaatttggatgaggcagtttatgtgataggtggttttacttttgacggtaaaattacacatattgtcgaaatgtacaattcaactgacaatacctagtttcaaaatataacgtcgttacctttacctattcactatgcttcatcaggcatctatggggacaagatctatgtggttggaggatatacagggaattggctccctagtaacaatctgttcatttacgatccagctaccaataattggactttggttaatcctatgcctacaccacgaggttcgccaaatgcaaatttcgttaatggaatattgtatgtaattggaggagatagttacgatcattctcatgtagttgttgaaggatctaatccgattaccaacgaatgggtgacactagcttcgatgcctacagcagggcatcatgctgcatctgcagtagttgatggaaatatttatgtgatgggcggtagactcactggttctttggtaaacgtagatgtaaatgagaaatataatccttttttagacgaatggactactgatctgcaacccatgccgtcaaaaaggagtggtgttgcggccacatcggtaaatgggtcaatttatgtattgggaggtgagcaaaatcaaggaacgtttgataataacaaacgttatgacgtagctactgatgcttggagcgaagaattgccaatgcccactgctcgtcatggattgagtatcgcttcatatgacgataaaatatatgcaataggtggtgatccacatactggattgactgtttcgaataagaatgagatttattattttgaattaatactgaatctagttattgacccttctctgatccttgttacaattttcactagtaccaattttgggggtaggatttaaggttattagagaaaaaaaggaatatcattgtagggagggggctaagatacttttactcattgttatgtgttagatggaccctaattctattggataaatcctatgaatttcactactatttcaatatattcttgagaatccaacattgttatgatattaatgttttgcatacttattcttgaaataactatgcaggcatgaacattgacggattattacgaaaccttaattaaattatgatatttctctatattattagacttacctatgtttcatagatcaaaactattgatttcttttttcgctatatctttgattttactttctactataacttcttcatatgttcaggtttcttatggggcttatgctaaagcccctttatccccaactggaccgacagttaacgatgatacccttacggttgaaaaaatagctgatggtttggattttcctaccagtatggcgtttctgggtcctaatgatattctagtcactgagaaaactacgggtaaagtgatgcgagttacaaacggttttgtattgcctcaacctgtacttgatgtaccagtagcaaatgcaatagaacgcggcttactaggaatagccgtttcaaagcaacctgacggcaaaacttatgtatttctatcttatactgaatcaggcgacggtgtagatggcagtgatgttgatgctcttgtagatccattaggaaatcgattatatcgttatgaatttgttgatggtagattgataaatccagtattattactggacttgactgcaattcctccaaatacaagggctgaacataatggaggtaaaatccgaatcggtcctgataataatgtctactattttataggggaagtcggaggtcacagaacccaggcccaaaatataatagctgggcctgccccgaatggtctaggaggcgtacttcgaatcactcaagacggtggtatagtagatcccggtgatccaatatttggtgaagggttgcctcttaatgtatattatgcaatgggtattcgaaacagttttggcatggatttcgatccattgacagggaacttatgggatacagaaaatggaccagtagcaggcgatgaaataaatcttgtttttcctggctttaatagtggttggtttcaaatccagggctatgtggacaaggatttattagaacatggtaccacagaagcagatttggtctattttggaaaaggtcaatatgctgatccaaaatttgtgtgggatacgacaataggtgtgacagcccttaaattcttaaattcacatagacttggagatcagtttgcaaacaatatgtttgtaggtgatatcaataatggcttgttgtatagatttacactgaacgaagagcgggacgctatttttgtaaatgatacttatgttggtaatacaggattattagaagataatgaagtagatgaacctaaagaaaatcagcctctgatctttggacaaggtttcgggggaataaccgatattcaggtaggtccagatggttacttgtatattttaagctacactggatcaatttatagaatattgcctatatctgatagcattgaaccaaagtctcagccaagttcacctccaagctcccctccacaaaatggtacttcagcttccaagtccgtttcggcagtcattttgggaatagacggtgataattcctattcaccagaacctatcgagattgaatctggacaaacagtaacgtggattaatggagataccatatctcatacggtaacctctggacaggatggtgacttggatgagggcactctatttgattctgatgctataattccaaatcagtcatatagtctgacatttgatagtcctggagaattcggctattattgtatatatcaccccactatggttggcgaagtaatagtgaatggaccagatacatcttcacctacatcagaagattccccagatgaagagtcagatgaggaagatgaggatgagtgaaaatatggatccatttggatttctcaagtaactcttaccaaaataactaactaactatactttcactcccatacccatttttatacatatagagcatattaacctatgaagcaattgaaccatgatcaaaaactacaactactactacctgacttttttttgaacttatgtttttatagaagtgttgacttgtcaaattcacagcggggggatttattatgttaagtagcaagagtgcactagcaaatatagctgttgagaatctggaaatttctagaaagttttatgagaatactttgggactggagaaaatagactctgttggagatgaagtggtggtttatagatgtggtaactctgccattatagtatatcaatcacaatacgctggaactaataaagctactagcgcgacttggatagtgggagaggatatcgatgtcttggtaaaggaacttaaatctaaaggtgtacagtttgaacattatgacatgcctaatacaacattaaaagatgatattcatgttgatggtaacatgaaagtagcatggtttaaagatcccgatggtaatatcctaaatattattaacaaatgaccacatacaactattcttcaagcaagcgacaatagttgttcatttttatcttctcaaccacagagaattctatatttataaccataaagcaaaagaaaacaatgtgattcatcgtgaaattaatcatattctcgcgatgctattatttctttaacgtcgacatactgctatattataatcgatgagaatgatacaaattagtttcttttctgatttctataatgttctaaataaaaataccttgccattcattcgggtagtaagtgaatgacaaggtaacgtcttctttatcttgtctgtggcttatggatagggcgtgtattcgtagcccagcattcaacgttgtcctactaatttgtatcgctatttgagctgggggcaatgttgtcgctactgtcgctactgtcgctactgtcgctactgtcgctactgtcgctactgtcgctactgtcgctactgtcgctactgtcgctactgtcgctactgtcgctactgtcgccagcattatcactggatgttgtgccagtatctgcctctggatcataaatcggtctaaaacaatctcttatttcgctttcagatgcaaatgcctttacgccttctgattgagtcagacaattagaaaattcttcataattattttttcctgtttcaacattttcgccattaggttgagcaaatacagaataacttgttatgccggatgcggcaaacaacgatgctatcgcaattacgatggtaacagttattttcttagtcatgttcattaaatttatctgattaacatcgtataaaaacattaacatcgtataaaaatagggacttgtctttctactatagggagttaccacaaatttttctataccctaagagtttgttgtcatacattgtgaatagttagacacaaaatggatttcatttttaggttttagtgttattataagttaccaaggttttctacccctatcgtcagcaaatagacaagcaagattgcaaaaacaagcaaaatatcatctaaataaaaagcgaagagttgacgatattcaattatatttgtttttcttagtacaaatattcatcaaatctttataaagatattttactatatatagaatatatttgggtaattatagatagttttgtgtctaaagagacacacatattttttctaaaaaaggtcaaacatctaaagcaccgatgttaattcattgctacctagtatatgtcaatttaagtttaaaaggcagagatctaaacggaactggatgaataacaattgagtatcgatttcagattctatattacaatttgtcatcattatatctctccggactcagaccctagaatgaatcgctagagaggagcttaacaatagattataaaattcagactaacaactttcaaaatcaaatatctaaggataactttttagatacataaaaaaaggaaatttggttgtataaggatgatgttattttgatttgctatttattgtgtagttgtgctattgtctgatgtgctattgcccatcatggtattagcgtccattcccatccctgtatctgataattctgttgtattatcaaccggcgtagaagaagaagtattcattgtcatgttttcttgggcgaatactgacgtgcttgctcctattaataaaattgatgcggctaatacgccaatgactgcaactgtaagaatattgttcattatcagatcctttgcaacaatgtttataacattccaccattcttaaaacatgatataaattagtatcgatgaaccagaatatcgtagcttacttttataattgccattgaccagaattctataaattaacgttttattcaaaagtgtaagatcttttgaattatttgtgtatctatatgaatttatttgatacaatagtcgtaattttctttaaatataacctatagagtatttaaattgaaatgaagaacattatcttcctgaaatcagcaatcatatccatgctttttgtaacaattggtataacatttggagggtggacatcaaacaatgaagtttctgctcaatctaataatcaagaaaatagtcaggtacttgctgaattgatcgcaaatttaacccaagcacaaaatactgtatcaactagtaattcaacagtatcaaccgctcaactaactgcaataataggggaactttctgatattctcggtaaaattacaactgataacgatggtcaatatttagatgaacatactcacttctttactcacaacggtcatactcataccgtgacccatactcatcctcatcatgcagatcatcatagtcatcatcagagctggactgaaaaacatcatatctttgatcccagtaattgcaaaccaggtagaatgtgttaaatattctacccatcctatttgctcttaattttttttcctgttgtgaactatttatcatttaatggttttagttagatgtcgtagcagtatattgatatttcatttaataaccttaacctcattgcgttccttagtccatcgtcaggagatatttatttgtttgatagatgagtaggatcgattaatagctgggttagggtttatggctttagaaaacatttgttgataagctctaatgatgccctcttaggtatctgatatgtgatatacattaaattcaatcatacagttcttgtcaataagtcttgataacaaataaagtcaaactgtgaccaatttatatcaaacttggtcaataaattcgaccattctctataatactataacaaaatgactactataataggaattaaaacaactgagggagtagtacttgcatctgataaacgagccagtaagggtttctttataggatccaaagatcgtacaaaagatttctaaaatagatgatactcttgcaattgctattgcaggacagttatctgatgcagaacatttaatcaaaattactgcagcggagagaaaattgatagaactacggaggggatttccattgagtgtaaaagaatcttcaagactaatcgcaaatctcgcctactcggggctaaagaattatcaaccatattacgtcgagttactagtagcaggcgtagataccagcggatcacatgtaaatgttgcagatatgagtggtgggattacaaatgaagattatgctgcatcaggttcgggagcccccatagcttatggagttcttgaaagcctttaccattttgatattacaaacgacgaagcaaaggaaattgctaaaaaggctgttgcagcggctatggaacgagaccccggctctggcaacgggatagatgttttagtcataccaaaattggtagcagccgaacgggttgtattataaggagtaggaagataacagaaaatgtctgaagataataattctgcaggttctccttatagttttgggaataacagtagatatccatactactatggacaaggtggtcgcctggtactagtagataatgctctagaggcggtaaataagggttcaacaactattgggttaaaaactccagaattcgccctcatttcaagtcatatcaaacccactttgcccttagtggatcctaatgaaaaaatatttgtaattgataagcacataggagcgactggagcaggctatattgcagatatagaacatttaatagaagaaataaggttacaaggacagaaacatcgcatttcatatgatagctctatcgacataagatctatcacaaaacatctaagtacttatttacacaattacacaatttatgctgtaagaccacaagcggcttcaataatcattgctggcgtagatgaaaatgggatacatttgtaccgagttgaccccagtggaacttatttgaaaggaggtgggtttgcaataggtcactcttcagatgtggcactagacgtgattcaaaaaggctatgacacaaatatgaatattgaacaggcattgaaattgtcaaatgaagctatagaaaaagcaatcggagaaaaaccggtagttgagtcggggatagttacgtcaaaaggatttacaaaattaagaaaggatctctaacataatgtaatgttgataccttgatatcaatcaattcattatacgtggtaatgattcataaacacattttttttgctattttattcaaaacctgtaggtcataacgcacgaaaaaatagattgattatttgaaatcttgtatcttataatatcttaattcccagtttaggtgcaagtcctaacaaaatgaatttgatatttcgtcacttatttcctattatgcgaaaatttaatgtcattagtgtaaacaggcgtgtattccttttctggtataacttcttcaagtaagttctcttgcagaatttttattatttcctcaattatcctgtttgagtaatacatagcttccactttctcactatcagaaacggcatcggattctacaataatatattctgacagaatattaacattaatctgaaatattttattgttgctgtttttgtctactactatccattgaagtctaaaacctgtttctttttttatcatgccgaaccatcttaatatgccaaaccatttcccggttaaatgatctacgatgggttcgatgttaccctttacaggcatatatatctggattaattgcttatattttctaagtttttttgatttatctatttctagctcttcatttaaaagattatcttctaatatttgattgaagttatacgcacttccttcaaccaacttgtaccctgatgatgttttctcaattaggttcaagtccaaaagtctctttaaagcccttgatagactttgttggtgaatatcaagttttctctcgagagccttaaatgaatatgttgaccacatttcttttcgtagcaaagatagaattttcttgtcgttattacgaacatcattgatagctattataaactcctcatcatcaatatgagggtccgttttctgttttgaatttaatgaaaagtaattataacccatttttaaattagttgtctgatttggaattatgtgatcagcgtgaagaagttccgcatagttttgaaaattatcacgattactagattcaggcagtggtaacaataactttgtcatttgcaattttagttcaacctcttgcctagagatggagataattttacaagagttgatgtcgaaattttcccagaaataaattttattttatttatagataattctttcctcaattccatgagttatatatcgattaatccgcttaaatacttatttcaaagaccattttatctagtagtcatgatcaagttttatggctcattttcatagtactgaaaatatagataaaaatgattaaggtacaaaaagtagtacaaattaaacaatagagcgttgtttggtttccactgaaattttattgatcccttttgtatttactaacgagattcgctgaacccatctagacaaataaataaatgaatggaattaacctggtatttcaatttaatcacgacctaaaattattcatgagtttcatcaagtcataatgtttttcaatgtattcacatacggtaaaccttgttactgagctaaaacatttcgtaactttatatctccatttgttgatctatcgggtagaaaatttctgtgcttacaacgattatgactaaataaatctgaatttggtaacgagaaatactagtatatagtaactaggtgagcaaacaaataggtaagaaaattatattagtatgtactaatataaaaaatggattttcatcagaattttaccacaacaaagcttagagggagaattatcttttcgtttagtttatctatttttttaatagctggaatggttattttgactagtacttcttctgttgcagatggacaggtagggatactaaagccggcgtattcaatcacactcagactgattcttcaggaaacacaacttggataaattctggtaactggtcaatgattggaataaatacatcatctcccagcttgactgccattatagaaatggccaaaccaaatgggagtgcgggacatgaacatgaacatgagataaatgatttcaaattaatagggtcaccagttattgaaaaccaaacgatccaccttaatggtacttcaactataaccatgagggatggtacagttacaaatgaacccacagtaattgctttatcacaggaaaaaattgacatttactttgatcctgaggatataaaaaatcattttgagaatcagtcaatcttaggaatagcgaattgagtacatcaaactttcaataagtaataaatatatcttcttttatttgataattccatatcttaataacctctataactggtaattattctagcgactaaaattcattccttgaatccttttatatctcagatctttttttacttttgaagttgcgcataaaactctaacaagttagtgttaaatggtagacatcatatagactcttattaacgcagtcgacaattacgttacctgttcttaatatgcatacaactgaagttaggattccactctgatttataaaataaatcaattatttcatggagatagttacatttgtacaagttaaatatcgataagttcacatcttactgatccccaaattaagagtgttctattttatatcacttgcaattttttgtctctagaacaattataaaaatagaaaacagggtcctactttgcttggaaactcagtaaatattaataaaagaactcccttaaattcttattgtattccaaatatacctttaagcaacaaaccatttgagtccaaccttggcagttactgtatgattcatctaatgatggctggtcttcatttatccaacctgcctctgaaattgttactagcgtcgtgtcatctccaagtcgttcaaaatccatctctactgtcaagcgattagattctactgcactagcccattcaaaaacgattttctggttcttaattgtctgttttacatatactgaaaaagcaccaggataatcatgaaaatcccacatgacctccattccttcatcgagtgggccacttgctccacctgtagtaaaatatttgcttaatttctttggatcgtagactgcgttatatacttcctcgacaggcttttttattttggcttgcactctaaatttcaaattcatacatatacgccgttagaaggtttattagtagtatatgttatataaatgtaacatgtattcagagagccactatgaccacgtttttaaggcactgggtcattctggcagacgtcaaatccttgatttgattaaggataaaccacatacaacctcagaattgtgtcttatcttaaaaaaaatggatagatgtacggtaatgcaacatttgaacgtcttagaaaaggctggtttgattatagttaaacatagtggaaaatatcgctggaattacattaatcttcttcctattcgagaattacatgatcgctggataaccaaattttctgtggatgccatagacttgcttgcaaagttgaaacatgatgtagaatgagatcactgaatacgggaatctgaattttagttcaatagatgtattgaattatccaattgttatttggattttgcaattgcttttgggtagcagttaggtttattgatgtcgcggatcagatagaaatctagtttctgaagaggaacagcatgattatccatttgttactaatgggattaaaaattaagtgtgattaataaaatttcactttgagtactaagaacagccattgattaaaaaattaatatggtgtttcaaaagaattaaatctgtttcttaaccgctgatttggtatgaggtttacatcaattgatacattcgtgctacttcagatggcaacgtataatctaactgagtgtaaggtacaatcccaagtttcctaattgctaagaatatcgttccataaactttatctattttattcataaagtagtcatatggggtatcaaaaatactttttattcttatcatttcttattgtcatgtcattaatatcgccattcaatgtacctatagaagaatcattagctcataattttacctcggatattgatgcttcctttctcagtgaagataataagttatatcttttaaaaggcgaccagtacgttcgccttacattttacgtgggccagggtgcaacgatggatagtggttatccacaaccaatcagtaattgggttgatccgcaagattcttaggctcataggtaggattacgtatatatcactacaaaaacttttattttttccctcttctcatattactttagatatttttggtatcagtgaatccaattatttatacaaaaggttcattaatagaattaagtctgtttttttcatttgtgaacgttcctttttttgttgtaatagggtgtcatcctgattaagtgcgtggtgatttccaggaaagtattttgaatgaaaaagataaaaattaccaaatagattatctagttatttaccaatattgaatattatataccatttctgatatcgtataagtacaatatgcttggttagttgttggttggtgcgtcctatatgcaacccttaaaaagttaagctatcaaatgctaattatcatgatacgatacgcaaaatactactgtgaacagcaatttgaaatcctacttacatgttacttgagatatctactaaacaccaaattctatacatctcgttataaccattgatagatacccacatggctgattataggtcaaacaaatcgactgtgaataatttaatagcctattctaaaccaaataaaaataaaaattttcctctgattattgcgtatttgaaagaatctgcaagtcaaaagcttttatcaaattaggatgaatctgtgtgtgaacgatcatcattatatccgttggtgagactttggaatctagcgaatttacaagctgcatgataccactttccagattagtaccataggtggaggtcctattttgggatataatgggtttaagttctttattaaatatatccaatagtttttcagccatcccttttgcactttgataatttgccatatttactatgggtttatttgtattcattttggtatccgaatccttcattgttggtgacatatcaatcatcttgttcatatccatgttgttattgttactagaattataactattactattttcaaccatagacccgttgttcatatttcccatatttcccatatcggtcatatcaaattcaacactataagcatcaccataattccttaatacctcgtctaccccatcagcaaatctcataggatggattgagccactgttgttatcctttttcggactaaatatatttgatatgaacgtggtaacttgatttagaaagttagaatcttccgcttgctttttagtttccgctagggttatgactttgtctacattcgtattgatacttgtaactaattggtttgattgttctagtttttgtttttcgccttgaactgatgtaggggtatttgaaaatgaagatgttaggttgcgcaaatcttctacagctaatttgagatcatctccaatttttttatcctgtttaactatttctaccaacaagtcccagtaaaaaatactaacagcttcatctgcatgtttttgagccaaagttatattattatttagaagatttgactgaacaagattcgattctgtctgaaattgatctagagatgctacaaatgaagcataattatttggaggaaaattgtgaccatacgcattttggaaaaaagtagaatcagaactaatacttgtattattatgtatgattaagctaaataaaatacctaacacaaatagaacatacagggtatttttctgcttcacaatagtaaaattaggtttgaatgttataataatacttcgcttgattacgattaacaatctattgcttaatcgcgcatcatctattgatataatgagtgttttaatttacctatattaatccaaaacacaaaaaagatcaattgttttttattctgacagtaacttcaacaagttgttctcattcatcgattaatttatggcgatatcgtaacaatcattatcaagaaaaatataatgtcgttcttcctataattcgagtatcaggcagagaataatacaagaaacttcatccgtctatttcttcgtggcacaatattaaatgtttgactgaaaatagatcaccggatattgcctcgatagatatagtggagagacgcgagagactggcataagtattattatagaaacttctcccataggatctagtccacgatattaccaaaaactagttcgaaatgctgtcatcattattactttcttatccaccttcacataacgcatattacggaatttctattctgttatggatgtgttattgccagatcaccttgaatatttctttgatccagatataccgaaaaataaatcagttaacttctaggttccacatcgtataattgtaagtatttagctcattgtctatatcccaatctgctatgccgataactttattgagaaatgtaagcgaaccgttatcatttaactgtggatcgtatagttgtgcagtaggataaaacatgatattcccatttgaatctgtaaacccacgaccgtatcctttcattttgacagaatcgtgctttgaattggtattattattctcattataaactagtttgccgtttccttctccttgaattacgccatcggatctatggttgtttatataaatccagtatccagtaaccttgggtcctccgtcagtaaattgcccaataccttcgtaagaaacctgaacctttgtcccatttattccgctctcaattattgtttgatctatgatattgccatgactagaatagatctgttttgcattcactgtatttgtatttgaattatttgattcttgccataataaattatctttgttattaggttctgaatctagaccatttgagtccggatttgaaaaagtactggaaaaaattccaatagccataatccctgcaattgcaataaataacttggttgatacatggttttttgcatctgaaatgttaacaatgcttatattaaagcgatatgtccattttcacatagggatactaccaatgatatcaaaatacacttaattttcatgatatgttaggagacaaggaacatggatatcctcttgttaaaagcatttacaaattcttcaattattcgtacctgttctttcgttaacctgcccgattgtattgaattggaatccatttttatcttattgtccattatttttgccacctctttaattgttttattcatagagtgtctatgtcgctcagatatttatatatattggtataaattggcaatgacaaacaataacatcatatcagggctattcgagcagcataaaatattttaatcttttcaagctatccacgagtaaaacaaggattcttgcgaacttataatattgagaaaacaggattttgaatattttaacctcagattcggtttgcttgggaaaatgagattatatccaaagggtctatcgattttcatcatcagatcaccataagatcctgtaaaaatggtcctgccctttagttcaaatcaattctgtacacttcgcgaaattccaagatgaagagtgaaagttatccccgtaaaaaagaaatatcataatctgattcttttgtagatgtggattttaactcaggacaattgctaagtaccatatctaatttttgtaattccacctgagatcgatttgatatagtcccttcttcataagatgcaagaaaattttccttatttccttccagtgaatataaattatttaggattttactggcattttgtttacattgttcttcaaaagcgaatggggcaaacgatcctactactactgtggttacgatgattattgatatagataaaactatgatgattttttggtttttttccatagtatattgaattagtcaaatcgtattataataaagatatcttatatcttgtttattgagatgatttcgtgtcctcttataaacttgatatctactgatctatttattctctttttacatcgttccattcaatcagataatttcgcatttccttgtcagaaaatacgaaattgttaatttctatcctagaaaactatagatttgtatggaccagcaacgacaatatccgtggtgggctactaatgaaaataatttgatgtacttgctatcatgatgtgtagcaaaaagatctgccttcttaaataatgataatcaaaattagttttattatcatggataggtgcgagaagtaagatggaagtaacaaattaatctaatgtgttgggaattggcattgcccaagccaaaaatattaccgattgtcgtagcatatagcatatgcctgtacagttaatgctgaatccatatttgaactcgtagtaattgtggtggtaaatgtgctaagagaatctggaattgcagaataagaaattacatttccatcagtaatatcatatagggatcctcctcccaagttcaagtccgttgtgacatgatgcagtagaggaataagggttaccaccagttttatcggtcggtccatgaattatgtatatttttccatctaatgacgatgaaccagtggaagacgatgaaccagtggaagacgatgaaccactacattatttgtggtatctgtggaactgcttacatgattagcatcagttgaacaacctatactagatgtgcctttgggaccagttggacaacctacacctccaatacttttcgcattaccttgacctatttgacctccagcattctccatgccttgattaccaaaatgaaaattacctctttgcgctaatgaaaaatttaacagatcgggactataaggggtgttaaaactataaaaactaatccatacattaataatatactatttaaaaaagtcataatttagacatcagagaatggtaatatagattttattcatcatactttatcttgatgttgctgtcataataaagatagataatccatgatattttcattccaagtgtttggtatctatgtatatgtggtttgatcttatctgaatttatttgctagtcgtagaatgacatttaccgaagtttaaacagaatattcctcttttttgatgtgatacctcaatgcacgtataaatgatgatgctatcaaaaggcgtctaataatgtgtctaatagtggttaacatttatgagcattgttattagagatccgttaattctttaagagaatgtcagccaaaaagcaaatcattgttaattatttttcaatccttgagcaactagtattgaataacatcccagtccacatttttcacatattggcttcattgctttactgtcggagcttccaatacaacaaggctgttttgacattcctttatgatctaacgataatattgcccacgaaggacagtccacgggggtagttttaatccctccccagttccctttcattagttctagttgtttttcagtgttcatgataaagtctggatatttagttcttaatctttgaatattattaattatatcagttcttgtatcaccgaatggtaaccaaagcggatcattatctgcgaagggtgtatgaaactgaaaccctattttatttatcgtatctttccattcatcaattagatcttctatggtggtataattcagagaatttatagtcattgtgatccaaatgtccttccaagctggttttccattgcgatcgggcccggagatatagtctaaaatattctttttggttttggaataagcgccttttcctctaatgctatcatgaacttgttctgtaccatcaagagatacccagtaaaagtaaagcttgtcaaatcttactaaaggataagtaccgttagttactacacatattcttctaggcatctcatcacaaaaaacctttatgatatcttgacgcatcattggctcgcctccaacgagtgtaactacatagacatgatgttttttaaaggtctgttttattatttctttccaatccccgggactcaactcgtctagttcatttcttctagttttccaccagtaacaatgggaacaatgcaaattgcagacgttgataatatctgcagaaccatagagaaatggtttagatttaaaaaactttatagacatatatttacttaggatactaaaaattgtaggagcgtcttttattatatcggttatacccataccgtatacaatatctaccaatagtaatcatagataacatagattccaaagtatattaataatacgcacatttagacatattctttagtggatctgcacttttttagatagggttaaactttccatatttctcttctatgattaatgtccaattaaattagaatgtcgtaaaaaaagtatttggacaaattgatcataaatgacatacaagtatttttatgttcaagatttatcatttctcctcattacttccacttgtattagtagggttatttcaaattcaggttttcatccaatgtactggtcatcgacaacataaaatatctatattgtttccgtattctatttctacaatatcctatggagtaatttggatttaattaagttgttctataattgcaagaaactatgacctactacaatactgtttgtttctatctctgaagttttatcatggtatttttctaaagcattccccaaacaaatccaatctattttccatcaattgagcaatgtccataaaaaatagaatttcttttatgtgctcttaatagtgctatgtaagttatcaggtggggtaaactgagatattgccttgaaaagttaacacaaaaatggtcaattatgacctaattattctgttcgttattctagttccagatcatgctgtttgctactgaattaatggttcatgtgaaggaatcatttgtaaaagatattgaaatgatgattaacatgaactgaaaacgatatccatcataatatacttaagagacatggtatgtatatagtaatatggtaatagaaaaaagttataataataatcaccttcccttcctgtcattagattctcttcataaaagcactgtgataaatcagacaaaaaatgaaagtatcgttgtcatagctgaagaacaatcaaatgaaaatgtggaaacatcttttcgccaaagatattctcaagaattgagaactaagaaacagcaaatatatgatatagaaagaggatttaatgagttagacgacgaaagaagaagtgttagacagcaaatgatgcgaactcctggacgaagaggagagattataaaagaagaagaaatctcaaaggaatttagcaggagattttatgaaactccagagatacgtacaaactagatctccttcactacatcacataatatcataatttttatatcgttttatctccaaaaaataaagtttttaccagtttatagaattgtacttcatgttaggggcgtttattcgtattttggtcatcatatcaacatgatctagccttgcttatagcaaagatacgttagtaggtttttctatacgtgttttgaaactctcttcaaccctgatggcaccactttttatttgatcttgtgattaatacatcgtataaaaataatgactatcaaaatttgaattggtaaaatatgttctaataatatctattcgaaataaaggctaaagttaaatctaaatatacccaaaagtcaaaaagaaaggatttcctctgattaacctctacttgtaatatattaccattagcagctatcaccaattcttcagaattgttggatgagatgatggttagataatgaaagaaagctttgttgggttctattgcaattacttcaggtctggtttttatcttattatatatgctatttagttatattttgataatccttaatatgtatcatgtatatcttaaggtatgagtaatatggacaacattcaattgttaatgtgtaagaattgtacccattcaaaggatgagcatagacaacaacccagtggcccaagattttatgatcatcgctgtttattttgtaagtgccagcaattcacataaagttatttttttgtctcatttctattattcgcattaatgacgtgagtgcctgattctagttgtacaagtaatattcctctgataattcatactaccatcattattgccatttccttataatttcctacatgagaatagaatcgcaatcatctatatgtcaatatgaaataagcacctttcaaacaaacatccagtaaaacattgcttttaatatgctatttaaataccacggaaacaaccgtattcaatgtttataccaattatgagcaacatcatcccaaaagataaattctgtgttagcgatttacccaattgaactccgtccaattgaactccgaaatcctaaagagatatccaaataatcctatacttattcccaataagaataactggtgggaatcagaagctgtttttaactgtgccatattatatgatggaaaaaaaattcatatgctttatcgtgcgatcggagaatatgaacactacctttcaagaataggatatgcatccagtgatgatggttacctctttagcaggcgtgatggaattgcgtttaatcctacattcgactacgaaaaatacggtatcgaagatcccagattgaccgaaattgacggtcaagtttacgttacttatgtagtattacccgatcgtccaaaaaaaggtcccatggtatcaactgcactagcaactactaaagattattccaaatttgaaagactgggcattattacgaatgaagggatggataacaaagacgtggttctttttccaaccaaaatgcgttctaaaaataccatgaatagtgaaaagatggcgtatttctgcttgcatagaccaagttcttgggtaggtgacgcatacggaattgataaacctagtatatggattggagagggaaatacattgacaagttttgaaacgcatactttgctcatgaagccggaacaaaaatgggaagaactaaagatcggtgctggtcctccgcctgttagaacaaaatatggatggttagtgatatatcatggtgtgagcgcagacagaacatatagtgctggtgctgcacttgtggatttagaagatccatataaaataattggtagaagcaaagaacctattttagtgcctactacagcatatgagaaatatggtgatataaacaatgtggtctttcctacaggtgcgtgcattatcaatggagaactttttgtttattatggtggtgctgacaaggtgtgttgcgttgcaacggccaaattaagcgaacttgtagattatatttttcaaaatagttaatctacccagggtcgttaactcattgaaatagtgtaggattaagaaaactgtttatttagtaagatttaataaaaatggagtgacaatttcactgactatcatcatatattatattatttcattgttcataaaatgtaatttagaaaatcttcaaatcattaccttttacattaactattaaataatatagtaagcagtgaaaacaaattcagaaccatgtcttttcatgttataatcagagattaaaaaaataatctctttaatatatgaattctttgagcataaaactattaaatttctattatgggctggcataagggactaggttgtttttgattccctcgttctcgcctaaaacagtggtataaagtgcataatgctgcaacgcaacattatcccacgttaattccctattgaattcctcaattcttttagtataatgagagtaattcgctccgagtttctttattgctttagcaaattcatttggtcttctttttaccactattcccagtcctttatttgcaaattctctaaagaaacctaaatcagtagctatgaatggtaacccgtgagccagtgcatcaaacattacccctgaacctgaagttacagtatagggaagaatgattatatcacatgcataaaaaagaattgaaagctctttatctgttaagaatcctcggttcaaattaattattttgttaaattgtgtatctttcctttctgtgtgaagaactcttttctggttatcatgaccatcaattgaagacggctttatcgtattgaataaattttcagactgattaattaccattgcccaatcatctggaataaccaaattatttaatatgtcccagccttttgtgtgcgtcatgaatccaaagaatagagctattttacgatttagtggtaaggaatatgcttctcttgcctcctttttctttaaaggcatattcaaatttgactctgcaccatgatatatgacagtaaaatttttcaatgatttttcatcattttcggctattaatttggccaaataatttgaaaaaacaatactggcctgactcatttgcattttttgcttgtttgctgtattaaaagatcggtagtttataaagcgtttccaataggctattatttgcttgctcaaattaactggaaaagtaatcatgtttttatctaaaagattagggtgttttgataactcaatccattgtcgtaatggatatgcagaatgaaatgtagtgattataggtattttacattctttataaaattcatctatgttagtacttaatttacttggattgatggcgtccattttcagtccataaagtccatgttctaattggatgtgcacaacatcagggacatactcatcaactacatctagtattatttttgaattattgccattttcaggatcaatacccagataatctccttttcccttctcgttgcataaaacagaaactttcatacctgatctttttaatccctctgtgagattctttgcatacctcccaacgcctccgggaatgggtggatattcggtggaaaccattagaatttttaacgaaaatttatcatatttatctaacttataagacatcataataatagattgtatataacaaccaagacatataagcaaatgtaataacgctataaattcatcgatatttacacattttttaccggtatttactatatcttggttatcttaccaaaactactggacacgttgctacttctgaaatccatctagaaatacttcctataccttttctatcatgccttttctttaatgatccactactacccattactatcatgcttgcattctcttccttagatacagtaaggatctcatctgcaggatgacctacccgaattattgacttggctacaacaccttcatggattaatctatctacctcctttccaatcattgtcttggctccctctctaattgtcttttcaaagtagtgcctagttttatttaaatcatccatatttgaaataaattttgcaatctctttgggatagaagcttgtatcgtcaataacatacaaaacaattatggcagaactctggcttgttgcaagatcttttgctttatctaatgcctttattgacagctcagtcgcatcaaatggaaccaaaatattggatttattgttattcattcattattacatgattctttgaatatatagacatcaccttttcgctatgatcctatctttctcgtttcaatgattgggttaaagaccttttatcctccatacccgctaattttgttttctttatgatagcatacgatatatcatgcattacatagtttgattacaaaatctatttccgacataaataccgtcgattgggttttttggtcacccatattctgacatgatgaatagaaataagaaaatttcaatttatctacgatattagattaatttatggaattaaatggaatggattcgacttgctagtaaacttatttctggattagtaaattggactaatttcagcaattaaggcttatcgatccttatatgttattgacctatcttaggtaatggcccaaaaaattcctgtatttcaatttatatgaacgattgcaaggcatcaagtgcggaatccatattgatatacttaataggaacaagttatatatctaacttatgaaaggtacttgtaattatagtggtataatgatgtctttggcttatttacacaaagcaatagccgaaaaaaacctggtaaataaagatgaactgagtttgaaaccgtctgtttgaaggaatacactactgacattatcaacacataagaaagaatagtcctaccatcataaagagacatttattgtcaatttgaattcttattaatgcgacagatatttcgttaggtatagtacgtgtttatttgctcctccgaaatcttgaaaaatgatttaggagaatcatcctggattttttctccaatcatgaatttaataaattttagaaaatactacaagtagatttgacgaccatatctttccaataattgcattcatgtaatatgcaaatgaattaaggattaaagtattaagccaagtaaaaaacaaacttatattcaatagatgctttaagaaaataataaaatgaagaaaataacttataacatcgagcgacaataataaaatgccgaataaacaagttaaacaagataaacaagataaaccatcagctaaaatagagatattaaaaaaagctaagaaaaaggtatccgatgcatcacaatgtgataatctatctatcgctgaaatagatgcacttcactatcaatatagtaaaatttctccattgtttaagaatgctcctcatcctacattcttggttttaaggatcttagaacgatatatccaaatagacaatattgttattggagatgtaatcaatgaaatcaaacaaagaggactcgatgtctctcatactgatgcgcaaatagatgaattagtgaatgagctggcattaaataataaaaaatataaagcaaaatccagtggttaagacctaaaaagtatatgtatttattgacactaggaaacatcaatactgtttcttcataatatttctaccatcaggtagatgttctgaaaaaagatgttttggattaattagtagtatttcgagaaataaagcaaatagctgaaatggaatttgcaaagtcaattttacctataataatttatgaaaatgatttcacaattgctagacgatcgaatactgttgttgaatgtcatatcctgctggagagatattggaacttgtttttgacttcagagttttgaggccttaacagacacgtgtattatctttaaatggaataaaaatgaggttcatcgtacaaattggaactagtgtaactataattattgctagtttaagattgttaataccatgttttattactggtcatctttcattgttatttgatattttggtcgagacaaaaaaacatcattaagatagatcagttaaatattctgaatttatgacaggtccacataatcctcaagcacataattatttaaatgcccttttgaacatttgaatgttgaatttggattcttctcagactcatttctaaattcattcatgttgtctgtatatactccactaaaaataataccacaagttttacattttaacataagcattggcatctttattccttcatcctctacgttctcaatacgttgaacttgttattatccttacataattctggaaaatcgataaccaaaatcaaaatgataatcgataatctgacaagatcggttactattcaagcataaacttccaaacatttgtgtatatttactttaatttagatttaaatgtcgtttttcatactccttaaaaattatacttttgtactttttgaagggaaaaatgtctatttagttaattcaaaagataaaatcgtaatttatgtgcctcatgacagaatacccggtgtctacaaaagttgttgggacacaaaaactttatgatatctatacatagtgtattcaccgattaaggatattttttcttgttacgatttagatgatttattcattctggtaatcatgcatttcaacaaaaacagatcttctatacaatcttttgataattctacttattattttcatacagatgaactagaccgctcagttgtaattgtgtgtatttatgattactaatcagtgtaatgaattgactttgcatttaacggcctttgaaataaacaaataatgtgtcatgattttgatgaacattaaaggttttttagcgggaatggatttgcgacaatagtaagcaaatccattgacaaagatcttatttttagtttaaatttagttatctaatctaatatgtacgtgaatatctccaactgccgttatgaaatgtttcaatgaatctaaccccctcagtattatttcttattctcgtgtttccattcttagggttattaagctgatttctcctattaatgacctcaataagttttctcatatttatatatacatttcatcatataagaacgtataaaatattgataacaagtcaaattttactttggaatagtaaattggggttttttgactaatcatagatgattatacctacataaagtaaaattttattctttagagtgaaatatcacctggctctgacctatataatacgctacttattgcacttgtaaatgaattcgcaactacttctcagaaaggagcataatataatccagttttctacccgccttgatcttttattgtcgttgcttattacaaaatattctaccagattattgaaaattcttagttatcgtacttatatcatcaatcgtttattttcgatcatgactttatttcatttggtaaaatattgatttgtgttctttgatgatttgacataaaagatcctttatccttctttatggatctaaaacactattgttatgttctcatgcttctttttattcatgaagtaagaaagatacaatcttatctttgtttaatttcaatcagtattattgttcttttgagtattttcattttgagtattttcattttggaaatacatgtgattattacctttagtacgctttggcacgtttgcaattgttgcttcatcatcattcttgctataagacatcaattactattcggattcatcttatataagattatattaggttctaatttccacgggaatcagttattttgaaaggcaatctaacgggaaggccttctgcaaagacttggcgatagaatttttcatcaaattcaaatgttgaccttatcttttttggaatttgaggtattttcagaagtcaatgtatttttgggttgattcgcctataattcaacaggctgatgatatttttactagttcgcttttttttcttgtgcaggaagcaatcgtggtttgtaaatgaagtctctcgatggaattactatcaatccagagtccagcatatccaaaactcaatcaattattgcgtgtcgatcgatatacgctgaatttccaatcctgatctcgtagactggattttacgatataatctacataattgtctatattcttgacatacgtttgaatcataacttgtcacctttatggggtaaaacagaaatgcattttgagaggactttttcaaattctagtagatctagaggtctttatatatagccagaaattactattgtctagtaattttccaaccattaatatatttgtagggcgaataataagtaatgaatgatgctagttttcaattattaatatgtaaaaattgtacacattcaaagaaagaacacagggatgaacctaatggtccaaaattttacgatcataggtgtcttttatgtaagtgccaacaatttacatgacctttcattccctatttttcttaagttaaatgttaaaaaatgctgtcaaagtattagcatgaagatggggtcagcgtcaaaggatatattccaaaataaatcatatcaaacaagttctttctgaaattattgatatcctattataataatacattcatactttattcaaatgatcttgctgtgttgtcattataatgaaaagatctggttatcaatctatcagatatgaccttggttgtgcgtcaaccgtgtcgttcttttttaatgaaacttatttgaccatttatctctaaatttgatatttctatctcatttatgtctcttattcccgccaatcgcatgaatgattgatattcttttatgcctattctagcttttatcattccctccttatccatctgcccatctttgaccaattctatgacttctggatttattattttctccatccttttgtttttggcacttacataatctaacagcttgaatactacgatgatgatgacgacgacagtaaccatagatagtataggtgtgtcactattgatcataggttctgccactatgtttccaagactcaatattatgattaattgataaatggttaattgactgactcctttacttccaatccattttatcacaaaaagaagaattccagatacaattaaagtcctcatgattatggataatactaatgcaggttcaaaactcaatgcggtattcaaatattctgaaaatgacgcaacaatgtccattttatctcttcatcgtgatatggggctaacctttgatatagatttaatttttcctctttcaaatagtttgaactattcttatctatttttcgaattaattgataatcactttgtaagtaatatatgaatggttagaatagaagaaaaggtaaagctttgttgaagtttcagtgacaataaataatactgtgacggtcgatttgaagtcttaaagcccatctcaccatacaaatagtctaaaattaattggtaaaaaatccttgtatgtagaatatggtaattgcaaaatccagatcaggtggttagactaaattgttgatatgtaaagtgagatccgttgacggagctactatattttctgtatagaaaaatgttatgaacaatcttgcgttatcatttttaaattaatgtctatagtatttatgagatgtatggtcttaaagtattggtactttttagtgttgttttctgttttgggttaataactctaacatattatgaatatggtattgtctatggttcgttggcatcaaataattccactgaaaacattttgaattatactatctactctgatgataggttgggaatcagttttgaatatccttctgactggaacgttgaggagaaaattaatcggttttcaaaatattccgatgtactagtgtataatggtagtaattcattcaaaatcatgaaatctcaatcaaattccgatgcagtaatggcagagaaactaggaggattaaaggaagtagtggaaataattttgccccccgaagaaagggtagtaggagatatagaggagaacaggtatgcgatagatggttcagataccgtgtcagtgctaactgcaatggagggattgactaatattcctgacaaaggtttggaaagaattctattgatacatgatgaaattttgtatattcttagttatcaaaataccgtggatgaatttgattcaaagcaaagtcaagaaacaataagacacatattgagttccttcagatttatagactcaaacaatgaggatgacccagatggtactaccgacgaggacgactaaaattcgacaaatacaatatgggtaacctttgttatgatagaaagcatatctcctctacttattttctcgtctgaattgtaagatgaatttagaatttagcgttttattgatcgataaatcgtaataaaccataggacaaaaaaatatttccagggctactgagtgcttccctcttgagtaaagtcttatcctgtatcaatcaaatcgttccttagatgatatcactcgatcttagtatctattcgatatgtggatcgacaagtatttttacataaaaaatcatgtacttttctcatcgtatgtctgaatactgtataaatatctcttcttttctgttcgcattaaataaatgattccaattactaatactatctctaaggccttggccataattccggcaagatcgacatcttcgggagttgaatttggtgaaaggggaggggggaaaatgactgagtacaagtataagactattagaaccaaagaccctactaatccaatccagtttaagattaaagattttttgtaatactcttttgaaatatactttttgtcagtttttttgaccgttagtttatcatcagagaaaattagcaagatatatgaaatcccatagaaaagttgtccacctgcggcggatattagaaatatgctatattcataccttaacgttgcatgccccgaatatactgcgaggtgaactatggctgcaccaagtgctaaaaacaagactgaatatttaataaattcatcattcgatatgggatttgttttgctttttcttctgcttagaaacatccagcttaaaactaatccgataatcaagataacacctacagctgaaccataaatcactgtagtaaaaatgaaaccaaacgattcagttatagagacattaaatacggctctttcacagttgcaatttgaattatcacctaatattgtacgtgcaggaggaattgtattgatgatatcatcagtagaattattggaattatcatctagtatgcttagaacaatttgataatttcctacctttggaaatatgtatggaacttggaaatcgcctactgctagccttgtccaaggataagcagacaaccgttcattggtaagtgttgaataaatttcaaccatccctaccaaattgctcgtgtctttaccttgcttatcttgaatgctaaattggatctgcgataattcatttggtttggtatattctggctctacttgttgaagaaccatgtacttatccccaattcctgtatctccattattatagtgagcagagtggctgaaatgtgcctcggccgaaccaaatgagcctggaataagaaaacaaatagaaaatattaaagatattgaaatcgagaattttgtattttgcttaaaagaataaatatcatttattctataatttttcaattttatataattatacgaaatcatgctataaataccgttatcttatttatgatcttcgaacttccaaatactataggcttatctgtctaatagctattactagaaaatttatgccgaattgccgttcaataattgcgttggcaacaaaattctggcacttttaactgaattagcatcatatacttgatacgacatgttaaagatagttttaaacatgtagaccaaggtacgttgcctatgcctgtcaagatattttattagagatgtaaaattttatgtttagtttatagtactggtcacttaatccaaggcgtgtgagtgattcaaatttgtagaattaattctgggattagaattaatagtattgttggtattagaaccatccaatcctattccgctgattagagtaccaaacatttcattagaactataaaaatgacctccagttttattaacatcaatcattaaacccaaaacctttttgcccataaggtgaatggtaattggcacctgtgcgtattgggttccattatctgaatgtatgcttgataaccctgtaactacgatgtcatttccagcaaaaataacgttatttgaggtaaaattattaatcagatgattatgggaaaggcttccatcgggttttatcatggtaaaattggcattaaaagttgcactcatgttcgaatttttcaaatttttgtctctagaatctttgatttccaaattccataatcccccttgaatccaagttactataccgttttccatctggttatttgcaaagtgtcctgatgcaaatactagcattggctcgttttgtccactcatagttaggttattgttatcatggcccagaggaaaactggctgtaggattgggaactggttcggaaatcatttgtgcatgcgcctttatcatgtacggtttctgctgtatgggatccaaaatcgtaagtgctattccgacggaagtgactaacaaaattattacaagggataggatgattgatatatcatattttgatatagaaaaaaatatactcactagatgatgtattgaattaatacataaatttttttcgcaaggggatcttatttcttacccaaaatgtttcctatctatgtttattgtgatcatgtcttaatgtaaactaaatctaaatactatcaataaattattttgtagggttttgctactttgtcttgaaaaagtctgtaaatccaataggacagatcaaaaaaaatattctgtatttcatttacttggtctatattttcctagccatagagaattttgaactattgttcctgagatcgtatccattacaagcatacaatgaatgatagcatttcaattaccactaatcccgttgtagaaactaatggctgttgccaggggtactaatctcctattatatacaaaagcccggacatttcagaagtatgaaaaaatcactatgtttggcatattgattatagatcttacatgatgaccttagttgattagatttgcatcttcatcaaaaccaatccatggggtaaaaatgaatagccatgaatattagatccagggactctcctcttacaaatatcggctaattcattttgacagagttactacggattcaggaaaaaaagattttgatactgattcctcattcacaacataattgggtctatatagtatttcttatggatttccatttacattaatgtgaagtgaaagcgaataataactgaaggcttcttttgatcctacaattaaatttgagagaaactatagagcaaatgaatgatgatgtttaacaaatgattctaccactgcggataaaaattgatatcattcctaatcaaacaatcagtagtatgttatgaataaatatttaatttcctctattatcgtatttggaattttcatagtctttacacttttagtttataatgatgttattaaattgcatgataattcatctgaggacagtttcttttatgaatttgatactggtgggttacagactcgaagctattttttttccccagtcgtaaccgaatttatgaatattttgtccgattttggtcgagagtatttttggattattgttcctattctgttgtttgtttttggaggaattgatggtagaatagctgccataaccatcttgatttcatttatacttgttattcctttgactactttggtgaaagatttggttgaccgggacagaccgcatatttattacgaaacttcagtcaataaattaccggtagatgaatcctatccttctggtcacgccagtatggtatcagctggtgcattagcaactctattatcattaagaaaatgtcctatgcagaaattgatatcctctcttcttgtaatcgaagcaggattagtttgtttatcccgtttataccttggagtccattatcctactgatctaataggcggtattctattgggaagtggagcggcacttttagtaactagtgctcataagatgattgaacgacttgccaagctcaaaatttgatatgtttttttctgaatattatagtttaattcaatctcagaatcatcagttggattctaaagattgattcaaaacgaccaatgttagaaaaggataatatgagaacgttttgtcctaacttgatccttaagggctgttattgaaaagacctccatgaacatgcatcttgaaattaatcaagttgacttgagaaactaatccagatcctgaatcactaaatcctcattttctgcatttaataatcgtgatctaatctataacacaaagtcaactggttcaatgggtttgtcgactgtcatgatgatataaagattgtatagtgatatccaaaaatcattgcaatactgtgatgtttaagaatctcatagtataaacatgcatcacttaatccgatttaatatatgtcattataacgttgcaatcctttgtctctactttcattattccaccgttacagtcactggagaaagaagaattgtagtttggaatagctgatatagtgacgctgtacattcccattgacaattttaccgtagttccagaagcatttcctttaaaggtatcagggattgggtcgttggcgtgaatattcactgtgaaatcagaagagacattccttccattttctccatttaatatagttactttcactatcattactcctttattctccgctgttcccaaggctgatgatgagttatcagtgctacgcttactttcctgatcgatttgattgggattggtgttgatgaaattggccccagtggaggtgtcatttcttaagtttgaatctaattctgaaccaaaacaggttaacgttacaagagaagtcattaatacagataaaaatggtagtaaaaacagtttagatgtaaatttcataaattatgtttgtatttccatattaaaaagagtacaggtctttataatccctatctaacaattgattgtataactagtccgatatttcctgggatggctgtaattggtccttgaccattggtaatcattttaaaagatttttggggtgagtatagttccaccgaatgccttttctctggtgattttatgatgttttttaatgattgttgtttgacgcaatgccaattgagcaaattagaataagaaatggcgtaccagtaactagattaaattctgctattaacatctactattaggaaaaaggattcgcatatttgtgacaattcatttagctatcttgtgatttatcaataggcaatttttcatgaaccataaattaaatgatttttaatttaagaccgcaaattaaagtaaatagtataatcaatttcaaaaataaggcaaaaaaattaaataataaatcacaattattctatatgattgttctaaaattaacgagtagtattatttttgttaaccatgttaacaaattattttaataagtgtttttgttaaataattaacaattaatttgttaaggtcgaaaaaaactacaagcatatttttacaaactactttgatagcgtcactctctttcatttttacttttgccggatctgacccttcattaggagccaatttgggatttgctcaaaaccttgattctaacaccatccggattcttagtacttcgactttcatcgatgatatgggaaattttcatgtcataggtgaagtaaataacactgcatttgatcctcaaacaaatattgtaattacaacaattttgtccaatacaacaaataatactatagtaggcaatcattctgctttctcatcaataggaaccctgagacatggtgaatcctccccatttgatatattgatacaggaccctcaaatattaggcaagtttaactttattgaattcgctacaagttctcaacctgcaatagaaaaacctggtaacctatttatcaatggcagcagtgccttctttgacaatattggtaatcctcatatcacaggtaatataataaaccaaggacaattcccagaacaattcttaaatcttgttgcaacattttatgacaattcaagtcttggtatagttggaactcaaagttttggactaaatgttgctaatttgtctcagaatcaaatggctccatttgatatcaccattacagacaataaaactaaatcccaagctgcattctattcactaaatattgaatctgatcaaagctctatgggtttaccttttagttcaaaatcatcatttgtttcaactggagagtctttaaatagtgttggtgctatgagtaatatttcatcgccaaatagtggagttggattgtcaagtatagataacagtaacaatgattcaagcaatactagaagtgattctgatgataatgatcaaaatagtaatgacaatgatgataatcaacgcggagaaaagaaaacagatgataatgggaatccatattataatgacgaaaattgtaatgaggaacccggctcttctggaggaaactcgtctgaatgccaggatgcagaaaatgaagaacaaagtgagggggaagatgaagattcttcagaaaaggatcaaggtcccccatctaactccgactctttaggaaataacactggagaagataatgacgatggcgatggaagcaatgacgatgataacacagatagcaatgaagacaatggtagtaacgatgacggtgataacaactagataattacctccaaattaatcacaagcccacttttttttaaatgtaaactatctcaaatgataataataaattcaaattgaacccattaattcttcaacccaaaccaagcaacctcaaatatatagaacaggattactgcatttatttggtcgataaagataaaagaagaaattacgttcatgaatcatacgtggtttctaaaaaatggctctcatggttgaaaggcaatgataaagtaataatcgaaatgttggaaaaacaatctgctaatttagtaaatgcaacaacatctttggttgaaatcatactagaaagtcaggaaaaaaacattagtaaagggaagatatcgaaaatcaaggatttggaacacgaaggtgataatataactcataatttatttactactttatctcaaacgtttgtaactcctttggatcgggaggatatcgctggactcgctagtgcgatagatgaagtgttggattatacagatgggatagcagataggtttttgctgtttaacattgaaagacctacttctattatgatcgacctatctaagattctacttggcgcaacccaggaaatacattttgttaccaaagcactatataatatgaagaatgcttttgaattgctgcctcattgtaatagtattaagaattatgagcaacaagcggataaattgtacagaagagcaattgctgaattatttgagaccaacacagatgccattgaagtaataaaattaaaagaaatatacgagaattttgagtcttcattagataaatgtcaagatgtagctgatataatagaagatattgtccttaaatatggatagtgtatttctctgtatgttatttcaagtgatatttagaatagtgtaattgttggatagaaagatatagtctctataataatttgaatatttaaccatggaggagagtttgttatatatcaccattgggactatatctttagcccttttgtttgatttcgtaaatggctttcatgattcagcaaatgcaattgcaacagtggttggaactagaactcttaaaccattacacgcagtgaccatggcatctattacaaattttatagggccgtttattttcggaactgctgtagccgcaactgttggaaaagggataattcagccagaattcgcaaccactgaagtgatattggctggtttaattggagctattgtatggaatttgattacttggtattttggattgccttcttccagcagccatgcattgattggaggtttaattggctccgcattaatttcaggtgggatgcaaactattgtatttgaaggggtagaaaaaaccattattttcatgattgcctcaccggccttgggatttttagtggcatttatttttgctaccctattggtgtattttctaaaaagaaaaaaaccacgatcaatcaatagaatgtttggcaaactacaaatatgctcatcaatatttttttcactgacccatggtgctaacgatggacaaaaaacgatgggtgtaataacggcattgttgatagctggagggtttttgcagtcaaatgaattcgttgttcctctttgggtgatattaagtgcagcaattgcgatgggattaggtacttttttcggtggatggcgaattgtaaaaacgatggcatttaagcttacagatctaaaaccctatcagggattctgcgcagaaactgggggtggagtaattcttgcagccatggcatggcttgggatacctgtcagcacgacacatgctatttctggagcaataatgggagtgggagcgactcggaggctttccgccgtgcgatggggcgtaggcaggagaattgtttatgcatggataataaccatacctgctagcgctgcagttgctgctttagttttcgtagtttttaactacatttttagataaatgttacaaatattcaaagcagtatggaaaacaacaactcatattgtttactgaaattcaatgattgaaattatctttcttttctcacacctataggaggatgttttgttagttaatgactcatttgtcatccataatatcgctttcataaaatatgagatgacattatctaaaattgaaattgtgggtggaatctgtgatttagttcgaactccaaccatgcactatccggaagaggcatttattatttatattaattatcttaaaaattttttctctcttaatgtttcataactgtaacaataatagaaaacattctttttctatacgacatattgattcacacgcaattgtatactgttttcaaaaaaataacaattgcatttgtctgttcatagggaacattagtaacgtacatctacgtggctatattttcaacagactggcctttctatgagatataattatacaaaaatacaaagactgttcacttagaacctgatggagatttagaatctcttaagactcgtggcaacaagatattactaatctggttttatccatgtgattatacataatgtaaaatatgttattgagaatgaattatagattgctttcttcctcagcatatagtatgaatatttaacataaacattttcatcttctaatgtttgacattatttttattgttcgaatgatagattatgtttgattaagatgatccgtgagcaagaaaataccgtccaacaaccaatgaataaagaggatcaatcagatcaagacgtccttttcaagtactttataaaatgtgacagctgttcatggagcacatccttttatgaagcgtccggaaatattcgcctagatgctgtaagattacgttgcccaacatgttttaagaaggaagtaagatggtggaaaggaccattttaaatatattaaaatagatttttgcataccattcacgaatcacaaccaatgccactttcaagacatagtacacaaatctttgaatctttgagggaaaaatagtatttcagaaagttcaatttgatctaaactgttcgctatgcaaccaatgttatgatagcaatgcttaacactgagcatgcttaatgtacacgatgaatctaaaggggagaaagggggatagaaattccatggttacatgtaatttatgccacggtggattgagtatatggacagaagcagatctaaaaatgcatgataaaatatggcatcagaaaaactctattagttattttattaggcacaaaaaagccaattagcctggaataattcttttcttatggttgaaaggaacgattatagtattatcaatttaaaaatctgatcattgatgactcaattatatggaatgagtattcaaatttattgacttcttcaaaatttaacgaatttataggacttgggtgtgaatattgtcaattttggtcgcagaaatattttccatacacatacttaatattgacattattatcctcagttttgagaaatactatcgctcaattaaaattctggcaacaaagaacaagacttgctggttaaaagtgatgataaaaactgcagagcaataaaggcatcaataggtgtctcgtaaccctccacgtttttgtattttgctaaacaaggccattactgactttatttttcatcatacttattacatgaatgtagcctttattactccacactggtaggtattcgttcaattgaaagagtgagcctcttccatgaattagtaggtatacaatagatgattcatcggttatttatatattgccaataatctccaatctgatattctgaatttcaaatagtaataacaatattatgactatctgatttatcgataaatccaaaataggaaaggagatgggcgagaatattgatggaaaacccgatacccaattcacttgacagtatttgacatggatgtattatgcataaattggggatcaggtcaaataccataaataggtaaccttccaaaatgatcatccacactttccggatcgatattaaggattattactttgtcatttgatttttgtatagaggtaggaatatcggttgcgagaccagcttgcaaactaatcgtcgatgttccatcatatagcgtagagttgttgtctggatgagacacatttaaaacaacaaaatctgttagggtatgtgtatgtcttgctgtaccatcaggttttatcatttcaatagcagcattaaagagatctgaggattgattattctgaatatccgtatcatttgctatgtttaatctccagtttcctattataatccaatcaacagcaccactttcattttcctagagtccagcaattggaccaaaagcaaattggtcatcgattaattgtggcaaaatagccattacagggtttgagatagatccgataaaaataaaaatagaaactaagataacagcaaataaaaatattaatggtttaatattctgcataatacaaaaagcaatttcattagtattaattacgacgtatcttatgcaaacggatgtaaataatgtaattatacgatattatctgtcttattgttattaatccaaataaacaaccagatctagtagaatagtatagtatagtatagttatgagggaggaaaccattatgctatggggcttaatccaatcaacagcatcattcattctttcaacatttgccttagaaactctgttataaagtttttattaataaagcattttcaaactattgagatcaattcatttaaactctaagaacagtgcaagttattgcttattagaattaaaaaaagtacgtagattgattcgatacgaaatatacaaaaagcatagaacaaagtttaaaatggtatctttttaatttgagttattccatttgtcaacaaaggcattcacacccagaataagattagaacacgttatatcatttagtgatgcagtattcgcattcgccataactctgatggccttgacaattgatattcctgatctcagttcaaaccttactgaaccacaactcattgaaaagttatttgatatgtcttcacaagtagaaagctacgcccttagtttctttattattgccatgttctggatttcatatcatcaggtattcaatcacattaaggattcatatctctctatggtttatctgaatttgctttttctgctcttaataacccttttatctatctccacatctttggtcataacttttgattcatatcgggtcgcatatttgatttattatggagtggttattgccgcaagtacatcacttgttgtaatttggtggtatgcaataaggatcaatgccgtaggtgaaaaccttcatcccctgttcaagaaaggtttgtttgtccaactgttagttcttcctttagtatttttattatccatcatcgtttcttttgtcaacttaaatatcgcgcaatatttttggttgattataattcccttgagtatttatataagacacaaattcaaacactaacagtttttattttttggtattgccttttgatactataaataatcttcaataaatattattatgaaaagctttttacattttatagattcataaatatttattctacctacattaaaaaatgctgtccataaaagtcaaaaccaacggaacaacatcaggttgactaattccacccgaacagatggaaaatagaaacggttgtaactacacttgcaagtcttcatgatttgacacactctttttcattttgtggatatatggtgtctatagctaattgattaaaattgtatcaaaattaatgctattaggtttgatagataattaggaaccttaaataatctatgataaaatggatatgggaaaagaccggataagaattttatccttgttcaataaatcctcataagaaaaagcttttagttccctataatacaatttacaacgttaggggtaaatacagtttaataaatacgatcttctcagttcaattgcagttatttctttctttttgttattatcatttttgagtaaaggttttttgcataatgtagctatggctttgtcacccgcttttgagcttcaagaactaataaatgaaaatcgtaactgggttcaaacatatggcaacagtaatgcatatttaaaatcaagctataccgacatactggcagtcaattatattagcgatggacagactttaaacactactatttggttgaattctggttttggcaattattcttctacttataatactactgataatcaatcttctagaaaattaagctacggcatgcttattgatgcagacgccaacacaaaaacaggatataacggtgcagattatgatttttatatcgaatcagtggatggaaaattaagtggatatctttaccagttgtcctcgactggtggttatatgttaataggatctaaaacgaactttactcaatcccataccgaatcatctgtaggtcctggttatgttaggataaatttggatctgagttctataaactcacccgttgaatataatttattattctattcagcagagtcaatcggacccaatgaagttagacaatttactaactggctgactatacctcctcctagcctggaaatatccacttcaccaagtgatataactattaggcaaggtgaagaacagttaattccagctcggataaaatccacttctggtttttctaatgatgtcattaatataaccttgggtgatactagcagttttaacagcaaaattaatgattacaatattcgatccggttttaattcaagtgaacttcatgtgactatccaaagaaatcaacctcctttaattaatatagatgttcctcaacaaactcctgttggcatttacacgattcctttggttgttacaataagggagccatcaatggccacaacaacaaaaccaacatttaacgcaccactaggtgggacggtaaatccgaagtttgaattatccaaaaaatatccaactgtaggctatttaacaaagccagtaaacttgacagtaacagtaattccacccaagggtatcgatgatcaatttaaagacttctgggggacatatggacagttcatcggcatttttgcaggtgcgtttgtgggtgcatttgctagacagatgtttgataaagcaaagagaaaaaaagaaaatgaatgaattttcaataaggatacgacagaaaaagttgtcgcgaacaagtcacaaatcaaaaaggacatattcctaaagaacattttattaatcttgctgagggagtatctgtttccaaataattgataatccttttcttattttatcaaccttacatcacaggtgattggcgtatttcaaccctaaaatagttcaattaaagcttggtatccataaacaatatttttattatcaagataaaagtctatgcaacttttctaaaaaattcttgtatcaaaatttccaaattatcttccttttttagagtaaatttttatgaaaattttaaagcttaaatattatatacattcgaaaacctctaagtctacaccatgtcagttctaaaaataattcaactatgtctcgatggtgattcttgttaacttggtctatttccttttgacttttattctattttatcagtttattcgataagaattcaagttcattcaaatttgtcgttagtccccacgggctgttcaataatggggattttataccacatcaactacaacagattgtcattaggtaataatactaccatttactctccctcgaccatacaccatattcataccatgaataatgaggataatagaaaagtggttatgatgttctatggctgattctcaaaaataataaattacattgagtaatagagaatagattttatcgttactatttgattatagtattatttgtattcgttgtttgattcgatcctgacatgattgtagtgttttcttcttctgtaatatagaggtcctcataagcatttcctgttgatccatctacaccagacaatatggtagcctttgtattctcgggatagaatatcgaaggcaatacctagtagatcaaagtatcaaacatttgattaggtattaatacctagtagatcaaagtatcaaacatttgattaggtatcaatagctagtagatcaagatattatcatcattacaaatttaagatacatcatttaccaaaacatctgcagactttcgaccaaattttttgattgggaaagcattagctaggaaggtattacagatattgaaataaatgtgttagaaaaccaatttagaacgtatattttctagtaagtaatgctgagattcgtgtgagttaaaaatcacccattcaaattgtcatcttattattgttatcaaagcattagtagtttggctaactccacgaaacatgtctatgctaacgaattgtaagaaataagtatatgattaattgcctccgccaatcatcttgtttaaagattctcccatttgttctaaaggacttttagactgctgctgttgttgaggttgtgctgattggttttgttgttggggagactgctgctgttgttgaggttgtgctgattggttttgttgttggggagactgctgctgttgttgaggttgtcctgatgatggtgtttgtgaatttgtcgagttatccatgcctatggttgtttgattgaatggaacagtggtcttattcgctataatggtggttgcaggtccagttggttgtaccattgtcttattctctatattagatagatttccagtttgagaagatatagtctggttttgtagtggttgtaattgagattgatctttaattggttcagttgtttgattaactgttactgttgtttgctcagctggaacagtagtttggtttgctattaccgtttgaggtttgtcagtcacagtggccatagtttcattttgtgatgtagcctgagagaatgtctggttttgggtttggttttgtgcataagctattcctgtgtatgcaaagctaacaaaaagtgcaatagcacagagggtaagtatacttgaacttatcattgtctggtcttatgttttattatttaaatagctaataaattaattcaccacacagatggtttaacagtaagaatatggaatccaatctgtgactacaatttttctatctcacttcattatggtataaactatcgcatacattttatattagaatacaagcagcggatttcattgtgggattgaggtaaatattaatccatataccaacttaacgaggctgttgtttacctcttctctatttattctgttttattattatcattaaatactatcttaaacctagatacttacctctacaagactcaaagggacaactgcattactaagagatgaggaataagatgttcatatgatatgtgcatccgcttttccctattcctcatctctggttagaagacatcattagaattagttatgtttagatctggacagagattagactaagtgtaagtaatggaatgcccgtaaccaatacaagttatgagagtagttcaaacaagtacaagccaagaccaaagccttttttctatatattataaaggcaagaaagtcaatcaaaaataaataattgatgccattgtagtagaattctcatagagcaaaatactatttactaataatttataactttgggttttcgtaaatgatcctttagcagtttaaaatataaggctaacaattttaaaatccttatccaatgttgaaataatcaatatctataatattaacaatgagttcagtagcgtttaatgactgattctttgtacttttgtttgacgccacttgctctaaacgatcttaatcttaatctgtaattgcagcaaggacaggtacttttgtcccatgaaataaagatttcgcatatagtacatcttttttgtctatcgtgttcatatcttaaggattcattagagcttctttttgctttgtatcttagacaaatgccattacaagtcatttacgagtacattttcaagtaaattgtttgctaaaaggattatcgaatatttatctaaaacatttcaatataataattctagctacaaaaatactactaagtttataaacaaagagagatataacaaggaagcttaagagaggattaaaatttatccaagcgataaagtttgtaagttgcgattatgataagtacaagaataatggtaatagttttatgattgtaaaacaaatacattcatagatatattttaagtattatacacattatttatcgcattaaatattgtatggaaatctgaaaattttaatggttagtaccagtaccctcccatgcatggtggtgttggacgctatgcatataatttggtaagatctttacgttcaaataatttagatgttaaagtcgtgtctgattctcatggttctggagactaccatggattatctccacataataagcaaaattccgagttactcctaaatataatacaagagtacaatccagatatagtacatattcaacatgagcatggactatatggcttttatctaaatcctttgtatcctcctaaaaccagaacagggttggataaattttatgataaatgtactatcccaattattactacgtttcatacatcaatgtatttcaaacagtggatgcaattactaaatacaaaacaaggcaatagtaatgatatactaagactgcatgttttttacaaaatttggaaacaacttattaattatccatcattgcatcgaataaataaacaaataatgtcaaaaagtgcatatggaatagtactttctaattatatgaagactttgatacccggaaccaatcttatatatcacggctcagacccctggccaactactattggtattacgcagaaagatgcaagggaaaaactaggattacctccacaggggagactagcattagcgcaaggcttctttacatccacaaagggatgggatattataaaaaatatgaggatgccaaagaattggaaaatagttgttaattattctaaaaatttttacaatacagaaaatgccagtttagacctaaggaatagcaagattattgatcaggtcattaatctaaatagacaatatctttcagaggaggaactatcgctattgctcttttcatgtgatgcagtattcctaccctacaaggttagttcaggttcaggcgtaatgtatgatggattagcacatggaaaaccctttattgcatctgacgttggctttttcaaagaattttccaaaatgaaccttggcatcatatcaaaacgagagcctcgctcttttgaaaaagcattggttgaactagaaaagaactatagtagttttgaatcgaccgtaaacgaatttaggcagaaaatcaattggagtgttatagcaagacaacattatttggtttacaaaaacatattagaaaaacaaaaaataactatggaaacagcttcaacgaaccacacaaatcaatatccataagaatactaatttgaattcagattagcaaaatcttgcaatatcattttggtatccgttccttcatttttctatagttgattataatcaataaaaacttaatctttataatacaaatttcatctgatctttataaagatattttaccatacatagaatatatttggttaattatagatagttttgtgtataaagagacacacttttattcttttaaaaaaatgttccaacatctaaatagacgatgttaattcattggaaatagtatatactcgtcttaagtttaaaagatctatacttctaaacagacaaagaatgcataacaattaatagtatcgatcttaatttgaatgtggttcccttctacaatacagttaaaacaagaatgtttcgccaactaactatacgccagcgactattgacaacgctatatctgatgttgtaccagaattaacaaattccagccctaaaggagcgatagcaaatattccaacaagaaactgtagtaaaagtactataacgataattgctattataatcaaaataattgtccaaagtgttccaagcatatcttcaagaaattttatcaataatagtttataaacacctaccatcagttatcttgaataatgtatctgttggtaatatcatacagagatggaataaatagtacataaaaagtcaataatctctattgaaattacatattgccgcgttgttgattaatactggatcatgattgattttgatttattatttgacaatcatagttttaaaaatgcttcgcctaattcagcatatttggcttatttgactcgaatgttactactataaaaacattgttagatattatatttcaatgaagactttcatcaatgttagtattccagtggtactaaccattagtttggtattattactaaatactggaagctccagtatctatggacaaattataggacagacaaatcagaccaatcaaactagtggacaaaacacaacacaacaagctcaacagcaattagatcaagctaatcaacagatgcaacaagctcaacaacaaaaacagcaagctgagcaacaattacaacaatctaatcaaacccaacaacaatctaatcaaacccaacaacaatctaatcaatctaagcaacaagatccacagatgaatgaaaaattgcttaattatacaaatgcagctatcttagctttaaacgacgataacacaagtgcagcacaagacaatctcgttcagattcaaaacgcactgatcaacgccagtggaaaacaagtagtagtagttccagctccagctgtatcatcaccatccgatgatgatggagattcgggctaattttttttatttataactttaattaaatatctgttattatgaattatttactcattattgagaatctaatattttgtccgcagaaatgaatgtgtgctgagcttaaattcgatctttactaattagctaaaacatagtaatccagaagagcagcagacctagatgatcaatttatctcatttcaagatctagtagagattcctataaactataaactataaactataaactataaatgaaatattgatagaaataaagaagaaaagactaatttatctttctcttctagttttttgattggtgatctttttgagcagataacaatgcatcgttgttgtctctttcaattctctcatatgctgatacatttctttttcctatttctgcaagatgtttagattgtttctttgtgttatcaactacatttttgaataattcaatattagaaaatgccatatcattaaaaattctactcattgctatggtattttctgcataattatttactaatttcgagtacatctctggcattcttctatagcaatcttggttattcaataattggttattcacatcttgtatatatggagtagatattgattgaaaagaatcaattgtttgtttttgatattcgaggtagcttactgcaacatctctagtagcttgaagtgtttgttcttgaacttgattaacggtttcagtataacgtggaatctgatttcttgcttctctaatactttcatctatacttttttttgactcatcaaaagcttgttcaagtgattcagtattttgttctacaattctattatataatctttgattactttggtaaatatcttgttgattattgacattcttgtaattctggttattaatttcttttttatcgttctgtgacatagtattattatagttattatactatataaacacaggtatctattggtttttaataccagacaagactttattcatcgataatcgactcctgttgatcaattgggaaatgaggagggattgactgaaacgagacctagagataaagtcaatacaatgaaaaaagcagttaagattaatcttttgatgatcaataacccataccattaaattttagatatattgaccattgttaatcataacttattcaaataatagaagacaatcgatctagaaacgaggagtaagagatactaatagttactagaagtaagacataagcgaaatatgtacacgaacatacagactctctgttccatattattcaataaatatattaatttctctcattctttagatttcttttcgagtttgtccccgcatgaactacagacgttattgtcgaaccttctgtccttgtcagaaatatctgtaattgcattgcaagaattacatttgaataaggatgcatattgaatcttagtgtattatattaaaaatgtgtctctctttaattcgctatgtttgtactaaataaatccgttagaaaatccaataatgactattttggaatctcaagtttttctctcgaatgtggtggtgtttaaatgttttcgtaacagtattagaaggagcactcagtacctctgcaaacgactttaagtaaacaatccatcctatgacagcagaataatttgctattgttcttcgtgttgataaattgatagacggtgatgctatctgtggcctgtttatgagcacattgaatgagtgtattccaattattttcttattaaagtttgttaaatcataatcgatgtaaggtgaacattttttttaaatgaggacaaaaatcggatacacaatacccattcccaaagaattgttgcaaagaatagatagatcttctcctgctcacgttggtaggctccgaaatgcggtggattttattgctcctataggtacacccgttcttgctgcagcagacggtgttgtaactcacatgaaggatgactcgattgttggaggtcctgatgcatcatactggttttatactaattttattacaatcagacattcaaatggggaatattctagatacgaccaccttgattacaagagttctaaggttagattaaatcaaagggttcataccggtgaagagatatctaaaataggaatgaccggttatacttttattccccatctacactttcaagtattcgtattcacaggatacaataattggaccgattttgaaaccatagagattaagaattttagaaacattttgtaaattaatcttgatataaacatgatgaaagaaacggaagtaaatacaaattttgcacagattgtaaattaccatatccgtaaattcgtgatgatttacatttctttcaattatttttcagatatcaaaattttcgcttgcatcactaatcatgacgagttttgttaaactaattcttcagagaaaacttattattggaaaattttcttgctttttctagcatattgtggtaagttactatttgttgaataaccatacaaacgataaaaaacattgtgaaaatcacagctaggaaaaaagatagataacctagaaaattcataaacattgtgaaaatcacagctaggaaaaaagatagataacctagaaaattcataaagtctcatctacactatttcatttatatttttagattctttccttttctattctgattttttacgtatagattattcagccaaccatttccgtctgactaacgtagatttgaaagtagtcctgcgttttcaaaaacagatagacaacatatgcattgttttttatttttggtagaaaaaaggagaaccaaaatagagtgtatttgaattcaaagatataaaattttttatataatttcaattttattataaatgttacaataaacaaattcaaccttctaaaagatttaataaattttatacaaacgtgtataaaatgattatctaaattgtatagcgttggcaaagaaaataaaactcgaagtcatcgttccaatccgcaaaaagaacaaaagcaatacgcagcccttgttaaggtgatagtaggaattaaagtcgaacacgcgctattattctaagcttttacttcttatctcataccaacatttatcgactattttgctcttagcacatcttcattttaaaagccactagattggaaatatggaattaatcaacaaatctttgaaatcaggcttcatttcttcattaatcttatgtatatattgctctacgaatgacgtttttgtttaacctaatgcctaatttgtatttagaatagttaaagttaaataaatctactaaaaactatgaataacaatgtcttctactattcgttcaattatggtagttgacgatgaagtggagctttctaacttgtttaagacatttttacaaaatgagggttataacgcaatctcttttgttgatccaggtactagcattggaacactttaggcaaacttctgataaatattctctaataattaccgatttaagaatgccgggactagggggaatagaccttgcaaagagtatgagaacattaggagcaccagatatcaagattttcttaatgactgcatttgatacaagagatttggaagttcagctgactaatacattgttgattaaagacccttttctcttttttgttcaagtattttattacatgagggtgtagcgctagactctgcctcatctgaaatcttattagtatcgatgatgattaattattatgcccatagttaatatacaaatgtatagtgggagaactcagagagaaaaggatagattagcagaagcaattactgaagatttagttaaaatattgaaggttggcaaagaagaggttatagtactttttacagaagcttcgcatggaaattggtattcttctggagtacgtctataaagaacaaacgagaaatgttatacaccaagtccaatttttacattaccgggaacttcaactgcatcaatcccctagtttgaattctcatattgttaaagtatgttgttctaacatgtagattattttcatataataggacaaaataattttgacattcgggggacataatattatgataattgacatgaattaatgtctggcatattcctttcaatataagccatccataaatagacgaatttacagatattaaatagacaagagttccaggatatttttaatcagaaatcttttgttcctacatttaattttcaataaattgctaatagtgatcttacagtggatttgtcataatattcataatttatttcataaatattaaccaacagatactcaattaatatatttactataaaatagtaattgcaattaaatgaaatcgggagatttataataattggatcatcatattttgccacacttcagttgacaaacataatgataacaattacttgaaaaagaaagttgaatagcagccattgaatactaggaaatacatgtgattgattgccatcctccattctatacaatggtttatttttctaaaattgattgtaaagttcttctcaaacagtatctatttatatattccttggtgtatagacgttactgatgaaacgctttcatttttatctatttggaaaatgtttattataggatcattttcgattaattgcagcaagatagtaaataatgacaaagattgagtatatttattgccattatttactaccacgaagagacatttgtatctttgctttgttgtttgtttctatgactaggtcaaggtcatatctttattcaaattcataattaatatgacttcttgtacattcaacgaatgtattacaaatcggatcaagataaattaggaatcaattgattcgataactatcatattagcctgcatcaagaactcccaaatcaataaattgacccgctgatacatcatactcttaggcgtattagtcatattttgtcgatcaacagtcagcaaattctttaagacataaaaataaatctgtgcctattgctgctaatgcaaacaaattgcctgttctgtttctaaaaaaattttgatttaatttccttttatcgtcaaaaatcgacttcgatgattgaactagattggttaaatacttttttgtacacattagacataacgttgatccatcaaattctaaggaatatggtcctttgttttgggattttaacacttttgttcaatttacctaattcacaattcttatttggacgacagatacctttgtattcttttgatggaaaaaatcatctgatgaatgtgaagtgggccaacgaacaggcgactgttgatgataggactaacgtagaattaacagttgtcttaccaaatatgatagatctgataagtacagaagcagataccacacaaccagttacaggacttgaaaattcattaaaggtagacgctttggctgagaaaaattactcttgcttcagaattggaacctgcattattttttctcatacatgagtttagagggatttgattgtgattacaatgaaatcttttgtttctttttttctaattatttccgtactatatacattatcatttgtattacccgttgctctagcgcaagaggtattggatgacacttatacttctgatgcatcaaccgaatcggtaacttctaactatgacgcagtgttaaaggctatgctaattatttcacaggttgcacttattggattaatatttaatcatctcattttacaaagaactcttcgtaataataagaaagctcaagaaaatagtgtagttcaattcgtttctacttctttctttcatacgtcgggcaagttggtggtctttcttctgatttgctgcacatcaattatcgtattttctacaggaataatgctactttcgtcttatgaattagcacaaaatttggaacttgatttgtcatcagcgttttggattatttattcaactcctgttggagatgtgtggatgttgaggattgttacttcttttataataattgccatcttaatatcatatcacatcaagataaggaaaaagatcaacaagaaaaatagattgaatcaagggaaagatctagacccgaaccaaattgcccctagctacggtaaattggttcggatacttttgttttccattcttgtatcgggttcgttcaatctttattctaatagtatgataagtcatagtaactcattagattcattttcatctttagcagtttcggtagattggattcatttcatgtctgtatctatttggataggtggattattctaccttacagtcttatttgtaaagaggcgttctaaacctgcggatggcaacaataatattgattcaaatgttgtaccgcctagctcagaaaagagagttttagaacaaatgactcaaggtttgatgtatttctcttttatcgctgttactgctatcagtgtaataggtataaccggattgtacttggccttcgtacacttgcaaaatttgtcatccttgtttacttccgtttacggtctaatacttgtaataaaactttcattggcttttccaatgatatttatcggtcgttataaccaagtcaagatatacgattatgcaaaactaattttaactagtaacgccaatattaaacgcaattcagcagcctatcaagattcggaattaaagtcaaacagtggggtattcttgagaaaaattaataaatacttaaaaatagaatccgtgttagggatactggtccttgtcgctgcgtcatttttaacagtaacttctccaccctctttagaatcgatggaccaaaatttgaatcaaagtaccctggatgtccatagttcaaatgatatatttgcatcaaatttgactcttctatacgttgtaatatttttgtcaataattatatcaatctttggcataataaattttaggaagaatcaaaagcaaatttatgaagtagcgtccctttctactaatcaaagagcaaagagtggatagatcatctaatccaatgctgtcatatttacatcttattaataatttagaccataaagagcgattatagcaaacagcccagattgcttcaagactatatgagtcctctatgatggattcagtcgtccatttgaggaaaattgagacttccctatcacgatgctgtcatttgatattcttaataaaaagtatttagagttatttggttataaattatttatctctcaaaaattcctattaccctctggatctgaacagcttaaagtctttttaggaatacatacgatggaataagtcatggtttcttgtcaatcaaaaacaataattgtttctctgctttttgggattcttcttatatttgatatcagttggagtacgaatattctggctatatctcataatacagtttcacttagtatattacaaggatatgtggatgaaataaagtttaatacatggtaacatatacatctgatagtaaaacggctacttccataactgagaggcaaggacataaaataaactctgcacccttgctagcctccattccaaatcaatatcttcagcaaggttacgacttccttaatggaataagaggagaagggccgttcggctttcagctccctgttggctcagcgctaccaggggatgacgattatagtcctttaattcatctgaacttaggaaattggacggatggctctaaagcatagattttgaaatcaacaaaagaaattgtccaagcacggtaatatggtgaagtttggataacggcatctggaataatcataaataatcctgccgtaaatgaataaatccatttgtcatttattattttaaatccttttaattaactggtttggtggcttattatccattatgcagatgaaaaatgttattattacttaaaatcttatttcaaagcagtattactggctaaacagtcatggcgatcaattatttagataatcctttgactattccagatatttgctaaactatccaaaatcatctctggaaatcctgaattctgttatcacgtctaactatatctcctagaaatgattgaaattagataaagttgataatatttttgtatttaaaacatattataattcttatccgtattactatgttaaacataatttcgtaatactgtagttgtacaataacagatattaactctacataatatcttactatatcataatgtattgttgcctacgtaagattcttggggtttttctctttagcattataatgatcatcggaataagtcatttccttgtaaataatgagaatcccaagttatttgaattcgtaaatgcatatgcaacctcgaattcttctaattcaaatcctttaaccgatatcaatcaatcagcaatcaataataacccttattctaactctacaaatgttaataccgatgttataaaaacactgacagaaaaagacaagccattgctatgtggagatgatgttcaaaattcaaacttttactttaacgagtttattactccgattctttgtagccaacccgttggattggccttagataaggataacaatatctggatagcatctggaaaatcaggaaatctcctcatttttaatactcaaacccaaaagtttgacaaaataataaagatacctaattggccaaagcaggaaagaaacttaggttctatgatttgggaaatgaagtttgatcgaaacggtgacttgtggtttaccgacgaattaagcaattccatatggaaatattttgttaaagaaggaaagtttgaaaactataggttacttcaagaagggggatatcctttatcaatagcatttgattctgacaataacgtatggtttacacaggtctttggccaaagacttggatttctggagccctcaaaggttattaacaatacgacagagggcatttcagaactggatatgtctaaacagatcaactttcaaacgatgggtcctatatccaatggaattggattctctcaccctaacgaaatggaaaataatagtaacagcaatgtcaatgaaacactgtggttttcgacttctatttttcctgtaggaggacagttaattaaatatgatataccaaatggagcactaactattcatgatgtaaatcatactcatagtgttccattcaatattgctgaagatgaaaatggaattctttggtttaatagccatgtagcaaatcttttcctatctttagatcccaaaacaggggcagtcatgcaatatgctacatcaaatccatccaaatcaggcaatttgaccacattgccctatgttaatacctatagagatggaaaagtatggtttaatgaacattatggaaatgccatagcttcatacaatccccaagataggactcttgttgaatattatattccatccaaaaatccattatgggttaattcttcaaatccattaagatttattcttgaccataacggttctgtttggtttacagaatggaccgagaacaagctcggtgtcattcctaaagaaaaattagatcaaattccaattacactatcagtttccaaagacaaaatgaccattgatggtaaaaacaagactggtgatgcaattgatatattcataaacaaaaatatccttaacacctccaagatcatggattctacaactggtaatgctaatggaaacagtagtgataaagggttaattgaacctgtaaatattactttgtcgataacctcttctatatctaaagatggaaagcttggtaatcttacaagtaattttagtcaagatcgtatacctattgaagatttaggatcagtatcatcaaatagtcctcaaataggaccctctacaccgtacaaaatctctttggaagttaaacccactgaaggagacgttacaccgggaaattataccttaacaattactacaagatatggaggtgacatagcagtatcaaaaatagtcgatttgataattcaataacggttaactacaacttaataatgatttaataatgtaatattattgtacatttattttcataaaatgtaaaaaatagttcaatttgacaaaatcttgataaattagaagcatcttactgccatatctagcatagtcctgtgttaagatattttcactattaaaaggattaattaggacattactgacatactgtcgtcgagggacggtttgttttctaaattgagctgttctgatcctttactggtatttgaatgatattatgcttaaaaattatgattatagtcattgtcctgtaaaccacgcatcactaggttatcacctactcctgttatatggactaaagatgttcggtcaaatgccccactgatcaggctattatcgtaggttgaaaataaagagaaaatgctgaactgaaattgttaatcgattagcacaaaaaagtaataaaccttataggtttatttacataggtctggaacttctacacagatgagatgctgagttccataaatcggagtacttccaaagtgcttattggttaaattactttcaacagtaatgactatcgcactatcatctagtaaacttatttgtgttggtacattagaaactggtccatcctttaatgtgactgtagtagttccattatatgtcgtagagttggaatcgctgtcaataactggatctccagataacttcaaatcgtatattgaatgagtatgctctgctgtaccgtcaagcctgatcatatagaaagtagcgtttaatgtaggattagatgcattaacatcagcaaatttatacactccgctcattatccatgctggttctgttgtgttgccgttatttgagtggcccgagatggctcctttcaagacagtagggtcaagattagaaggattttgagcaagaacctgattcaaattaaatgttgcaaacatagaaacagaaactgccagcaaaaaaattggtggaatcattttataaatggttttcattatcattcctctagaagcattggtatttaaatttcgccaatatggaataatgatgttttttctgatctaacatagattacactttttccttcggtaaataatttttgacattgatcctcccgcagaccttaatggatgataatgatttgttatttttcaattaaggtgaaaaagggatttatggtagataccggtaacagacaaaatattagataaaacttttggcataaattaattttttttgcaattctaattagaaaagaagttagataaataataattcctgaggggtcatagttaggatgttaaagttataaacattctaaaaacctattattccatcaatttgctgttttagcaatatgatcacacattttgaataattatggataattctacattcattttctaccgtactttcagaatgaataaatttgtgagtatgtcgataatgttgttggctagtcatttaatgaacttaatgtttttttctttgttgacatttacatttctacttatattcctctctttactatcgtttgacgatgaatatattgtaaaagcacaacagcaaatacaatcacaatcacaaacaaggacaggcgcgccgctagctattgttcctggacttactggtaatattcttactgcagtttctttcctgataggaacatcgtcttttattttgggattaagaattcagagtgcagctaaaacaatagcggtatcagatcaaggatctccaacgagtaaatcatctgtgattacaaagtattatgaattattaatagtagcactagttgccccttcaatagtgattaatatctatggaatacttttagtttcgagccacttatatacggaagatactccttatttgttactactttttgttcttttcataccaataggagctattttatttttagtcaagaaactacactgacaagcaacactttagcaaaaatatgtgacataagaaacaccggttcctaatccactgatttatgagatctttcttttattgtttagttgaagtgtttttttggtaatctaattaataatgcaataaatcaagacattgataatagagtaatagaaaatacaattaattagaaaataaaaatacaagattattaatctgttaacaacctatatcccgctgagaatatacaatttcaattatctttttttatagtcaaaaatgcccataggaggtattatatcaagaaaagttaattgtcaatgaccttccttctatgtaaatcatgaataaattattaagttgcgacaacttaactttataacaatggtggaattagtatgcgagatatgttattataaaggagataaaactgaatttgaggcaagtaatgattactgcaaagaatgtctttgtgatcatgcaatgtgtcctaaatgtggagccccttatcattctgctaccatcacagattaaaataaaaacataatcataactattattatttgcataaaatgatttctggatagatttgtgtaatgatcatttgccatggttgagtcttttctactcgattattaaaaatttaatacttttaacaaaccagtctgatagtttttgagatgtttagagaatgtaaataatcaaagaattcgattattatctgtcgatcgacttggtttttcactttgacatcgatatttttgatagttgttcctgactttgcgggagaattatttatcttcttctttcatctaatctcttacacagccaggatttatttggaccctagtgattaaatgccttggtgggttaaataatagatataatacaagtatattgcaaaaaagaatacattggaatgaagaatttttgatttctaagcttctttttattatacccatagcaaacggaatgagtattaatcatccgtcagattttagccttaagtttctataacatggttaagacgactaatattcattctcaaggacttgaaaaatttgtaactaaaaccaatcaatgatatatacatggatccaatcaaaatagcaaataaacatttgatatactttttttgaatatgattatttatacttttaaagtaatatttggtaaactgcgttagcagtaagatcactataattgttattatgtttagtaccattttgtttcaattcctgtgagaggtcatttgaatcaatagtcggtacccgcttgtctgaaggcaacagagggctgtgaatccaaatacttttgttgactagacgttagatgggtagacaagttgcgataattcttacaattaagaaattaataaaaattaaataaagtcttatatattggagattttaattcaaatacaatatcgtgagtcatcttacatacagcacaaattcatcccggtggttcagatatgtttgatcgagagctagatgacaaagatgatcatagtgaggataatactagagattataaacccacccctttaagtccaacggataagcctaatgaactagatgaaagaactgaggtgatatatggtaccgagaagactacttacatgattctaaaagttttaagcaacacatcactaaaatgggataattataccaattctcaaggtccttccattggaatgggtgtggatccaataagaaagggatttaaagaagctaataagagaggagtcaaaataagatttattactgaaataaataacaacaatatgcaatattgtcaagaatttatgaaaattgcagaacttcgtcatgtcgataatgccaaaggtggcatggctgtaactgaaaaagagtacatagcaaccgcaaatttgcaggaagctcaaccagttgcacatctcatttatagcaatgttagggaaatcatagaacagcaacaagaggttttcgaaagcctgtgggacaaagctattcctgcggagctaagaataagagaaatcaaacaaggttaccaaagagtctctactaagataatagataattggaatgagatttatgaaaatattaatagtttagccgagaactctgatgaagtgctgatttgttctgatattagtatgcttaagttagcatatcggtcactttttattgtatatcaaaagatgatggatagatacgataataaacaccatgaagggattagatggattgtttcagttaatggaaaggaagatgttgaattattgagattgtttatggatatggggattaaaataagaagcatcaagaatctccctataattaattatttggttacggataaaatttttctttcaaatattgaaggtaaccatacttcagaatacgataaattaattactagtatgttagtaagtaacgacccttcgtatattagacattataaaaccatatttgaagatttgtggaaaaacggaatagatgtaggagatctcattaatgatattgacttaggttatgatcctgaaaggatagatattatatcaagatccaataatgtccttgatctttatcataccatagtacaatcttctaagaaagagataatgatcatatttccatctaccggggcatttatcagacaacataaagtagggttaatctcctccatatttgaaacagtaaaaatcaatggcgtaaaattaaaagcactgattccttccgatcataggatttcacgaattattgaagagttaaaattggagaagaattttgacgaattaaaactcactaacatcgaatatagagacattgaaagctttcttgaaacccgatcaacaattttgattgttgacaaaaagatttccttagtcatggagctaagggatgattctaaagattcattttatgatgctattggtttatcgacttattcgaatagtaaggctggtgtattatcatatgtcttattctttgagaacctgtggaatcaaacagagatttcaataaatttaaagaaggcaaatgaaaaattaagagagagtgagtcgcttcaaaatgattttatccacatagctgctcatgaattaaaaaatcctttgcaacctattttaatgatgtctcaagttatgaaatctattctgaatcagatggctctagacgagccaggcggtgaggtaagggtaaatcctgcacatctaaacgaacttttggacattatcatcagaaataccaataagctatcaaagcttacaaataatgtattagatattacaaaaatagaatcaaactctctcatattagataaggaacccattgatatgagaaaatttttatacgatagtattgtcgactttaataaccagcttttgataaatggtaaaaaatatacttcagatcccaaaacgaatgaaaatataggaaatgaaattgtaaaactgatattccatgaggatcaggttatagaaccaaataagagcgcttctctaccgacccaaaaattagtcgtggaaattgataaatcgcgaattttacaagttcttacaaatttaattgataatgcaataaagtttacaagtctgaatgagcaaattattgtaaaattaaataagtatagattcaataacttagattttgcaaaagttacaataaaagatacaggagcagggatcgatccagatatactaccaaaattattttcaaaatttattactaaatcagtaaagggaacagggctaggattatacatttgtaagaacattgtcagtgcacatgggggccaaatatgggcacagaataacgatggtgaaaggggagctacttttgtttttaccattcctatttgtcctgcaccatcattaaatgaaaaaatattctagattgatttttgtatgctgattgatgataacttgatgcaattaaaagtgcttctgaatctttgatatctaatttttatcggttacttttgattactgaaaatactgcttgattcaatttttctaacgataccggtttactaatatattcgtcaatcgatattccatcatccaattttgacattatctctgacttagaaacctcttgtgcagtaataaagattacttttacaaaaggatcaatttttttaatctgattgattaattcatatccgttcatactaggcatgcgaatatctgtcattactaaactatatttggaatgattaatcttaaactcatcaagtgcctttatcggatccgaaaaagacgaaacaactaatccggacatttccaatgctttcttataaacagtaagcagatctatctcatcatctataatcacaatacagcgtttttggtccggatcggagtaattagaatctacatgattgtccaatagtcttgtataaagatctgactataaatatattctttttgaacgagataaaactttttgaatcacaaatgatattgttgtaaattcgaaaataacaacaagtatgttaagatggtaatattacttaactaattactaatggtaaattcagataccttaccttcatcctttaatagaaaagatgaaatattatccaataacagttcttaatttccttccagcgaagtatttgatttttgtatctgtaatgctatttacaatttatttgtattgatatcatcgcgatggctcaaggattgatttcatgtggtcaacctcataatggacggcaggtccaagcatgaccgttgatactgcaatttcggcattaaaagatataggtgaaaagttgccatataagtagtaagatatgatatgatatgatataatatgatgtcgcaataaatcaaaggttttatttatgcgaaatccaaattttttgccaatgaatcttatcctattgttagtagctttcattgctatatcttttttatcttattcgcttcatcctataatggcaaccaataataatttgacgacttttcaaggtccaatcaatgagaattcacagatagattctactttaaatcctagttctcttccaggtttacaaagtaatttagttaacggtagttctcttgttgcccccaataataatagcagtagtaccaacaagaatttactctctactgaggagtatgacaagattaagaattgtagtcttgatatcgataagaaaccatcttcaatagaatatttgactttttttaactgtgggcatgtaaagtcaaatagcagtacaactgatgataacagaatcaatcaaacagttagggaatttactttgattatagaggaaaatcaatccataccgattgcaagtaatgggttaacattttttgatgcatggacttttaatggtactatacctggtcccactatgcgggtaacagaaggcgatttagtgaaaataaatgtaataaacaataaagaaaacaaccacacgcattcactgcatttacattccacacatccttctaatatggatggaatagatggacctgggggatatattaaacccggtcaaaactttacctatgtctttacagcccagccatatggtgtttatccatatcactgtcatgtttctccaattgatcagcacatcaacaaaggtttgtatggtgcctttattattgatccaaagacacccagacaaaatatgactgagacggtaatgatgatgaacggatatgatttagactatgaaaaagaaggaattggtcccagtcatattccaactcctcaagaagtaataggagactatatgccacaagaatttgaacacggaaatgaagtctatacagctaatggtaaagcatttgattatgtggaaagccccattcctattaacatgaacacgaactatcgtatctacctgattaatatgttagagtttgaccaagtcaattcatttcatttgcatggaaatatgtacaaatactaccccagtggaacttctaaagaaccttcttttgaaaacgacatagtgacactaggtcaaggtgacagaggcatattggaattcaattatcattatcctggaaaatacatgttccattcgcatattaatgaattttcagatttaggatggatggggttatttaatgtgatataataatagtagaaaaagtccaattgacaggattattattatccgtagctcacaacttaacatatctattaatttcattatcattatttgatagctgtttctggaatttttgatctgatttatcaatacgtgaaactagctcgatatatcaagactgtgtcagtctttcatgagtgattccgttcaaacttggaagttgatagatatccttaacttaatgcatagcatttacaatttatgacattaagcctcaattgcaaggatgcgggagaccctgtgtgtacacataccatgtatggccaaacagaagaagaattgatggaaaatgcgaaaaaacatgggatagaagttcatgggtatacggaagagtcattcaaagaagaaatggcaaagaacctggaacattttagaaaagtaataaaaacaacttaatttatataccatatttttttccaactaaatagctaatttttgctgaagcacaaaggaaagaactatactaatagagccatttttttcttcatgattagttttatagacttttaataaggtgaataaattatgatcagagatatttttatattatggtgtctatcaaccgcgagaattatttaccacctaacctgttaaaggctattgccagttttctcatgaatgctttgtaatatttgtttaaacaattggatgaatcgttagagttttgggcagtcattgatataacatagtgtaacaagactacctatgattagtgtcaatttcattttagaatttgactatcagaatttctaggatagtaagaattaaagcaggaaaaagaaataacaaaagcatcaattagaagttcgcatggggaactttctcatacttttgtatcctttttttgaagggtaggatgccatttatgccaatgtcattattacctccatcccttcaccaaattaatcattgtcatctacgatttaattctcgtttttcattttaagtcctattttgggatacttatcacatgattgtagccttattacctttttcttgcagtattcaagactgagacttgtggattacccttcgaggtctgagtaacataatcgaagaaaaaatcctatttatttttgatctaaattatcatttcatgttatccatatagagaagtctaggtagaatgtctaggtagcctgtcttttcttttcttcgtttcaaatttacattaatcatgggatgtattcaataacaaaaataaattttcttgttttgaaattggttcttaattctgagatagtcataagtgaaaaaatcattattcctgtggtaaaagcgaaatcaaaaattagacccagactccaatcgatcaacggaacttcatagagtttatcatttctttttctaattcctgtgtttgaaccgaatcaaaatctgaatacaatgctatgaatctaattgtaatagtcccgttattataaggaatgtagatcacttcatttgttgtcaccgtaccagtgtgtgcactctccccgcttgcatagataaatgaaacagtgtttaacccgtctacattccatttggtggtgttaacatcttctaccacaaaatcatcataacctaacaaattttcttgtatttttgaaatactttttgaatagttgttttctgatgatggttcatccaaattgttacaatcaactattactttaatatatggatcatttgaatatatagagaaatcaacgtagctttcaatattatatgtgtttttttcgactgtaaaatttgtaggataatcgaggtttattttgcacttgtcggatctaagggtactccaagccaaagcgtcttgatgagtacctaagtgttgaggtacctcataacctataagaagaaccatgataaggatcgagataaaaaaatgcttcaccataattaatcgcacatcttcattctaaaatttattcctaattctcgtactcaatattgataagaaaatcaatatggagaaaaggatcaagcggaatgaccaaattacttacagaaatcatacaaaaaaaaaatgttaaaaattttttattggaaactgtctgtaacaaagacaaattggcaatatcaaagagataaagaacatcttgtaagaaactagatgaaggtctaaatatatgaatagaaagtatctttgactggttaggtgagaattactattttagtggatcaaaaataaataggatttctcaatactttctcaatactttctcaatactttctcaatactttctcaatactttctcaatgctcgatatattatctgtatgccaggatttaatatcaagatgaaccaaccgaaattacttgatttattgtctgatggaaaaatttatcttcttcataccataacacctgagaagtgacatctagatattccttctatttggtatctttattacaggaaccaaagaaaattcatttatatggataaatttataggaacaaaattcagagataagctaatttagaatgaaatattgagatgatattgattacagtttttaccaataattagaatcgtagttgaataattctcagataatgtaaatgacataatagtttaaataaacattagcaattaccgtaaaatgacattgtggtgccacaaatggctttattggataagggaagtgaatatgggttgccaagattattatcaatctcttttttatattcataactttaggcgtattatttggatttcaaaaattcatatgctcaaatagtcgatgacacacaaaatgattctctattgaatctaaaatagacaggtcaaaattctactaataatagtaatactataatagtatccgaccaaactgagaattcaatagaaccaacaacaccgattcagtttatttcaaagattagaaatttactgaatcaaattatagatgcatataataatcagaactatactgatgcggaagaacttgcaacctcttcatactagataattatgaatatattgaaactcctttagcagaaaaagataaacctttaatggagactacggagatcatgatgagagaggaactacgacagatgattctagatggtgtaccaagcgaagaactagtatcacatatagaagacataaataataatttgggtagggccgtggtgctattgtctagctcatcctctacttcttcttagattcatcttaattcataaattcaaataaatttgctagcaggttattgagacagttcaagtatatcgaccatcactctggctatagtacatatggctgatccatgatatgaattttaaagttaaaagaaattctaaaagcacatcggattagtcaagtttatgtaatttctaaggtatgacacttgataaaaaaagaaaaaaagtagtaatggcatcaattagaagttcatatggggaactttctcatgcttttgtatctttctctcatgcaagaatggtaagatagattggagtgttacctatctatttttttgctgtcatcatggtcatcagattgtggtatcatgacccatattagctcaactgtcaagatgcttatcacatgaatgtagcctttactacttttctggcacactatgcgcaaaagtgatgagacttgagtttcatcctttgaggttcaggtgtaagtattacttaagggaaattcctatttatcatttatctagattctcattttttgatctaagaagagagtctagtaagggataatcaaggtctaaggagatacctctttcatttttctaattttgtaaaaagtatttattaatacgttatatagttttataactttgtactagtaatgaacaagattctgttaatttccatagtggcggcgatatgtacaggaatcgcaggcattcttcatctaaatatgctgccggcttttaacactcaaatgactattttgtttctagttggcggattagcgcaaatattctggataattcccacagtaaagaattggggtaaaatatgggattatattggcatagtaggaacgattgcatttgtacttatatgggttattactaggataccggaaaatccaataacaggtagggcaggaatggttggagatacagcaattgctatcgaagtctttcaaatagcgtttatcgtcctattagggcttttagttgcaatgaaatcaaaaaaacaaatcgaaaattatcctaagaacaaaaagccttaaaatactctgtatagaccagataagcctatttatttttttacaaattctataccgatcctcaattacaatttatgtttatccagcatgtaattttattaatctgcctgcctgtctgtcttaactactgaacactcagatggtacaaagtattttattgagaatctaattaatcgtttaagctgtactatgtggcttaatatgtagtaaaattatagtaggaccggtagacctcaagactatatcggtcctctcgtggggattttgaatataaaagatgaatgtcatatctttcgataggtttatccaaaaagaattagtagttaaattatccggattttaatgtcaatcaaaaatcggttattgatgatatttttaaaccggtacatcagtttaactaatataatccattaatagacatatttgatctagaattttattaccaaaacaatagagaataaaccttatcataagtaagtcaaaactgcattttaccataatcccaagtagaaaggaactttggattaatttcaacaagtacaactcctcccttctttgaatcttcggcaatcatttttgctattggatgatctagcgtaccaagatatttcaaactaattctttctcctagtggaatgactgtttttaaatcatctactatggttgcaacccccttacctttaactcctctaactgggggattttcatcgtctattgaaaaataaatagttgatttctttagaatattttgagttttcttagcaaatttagaagtgtttatccagagtttttctccatctttgtcatagtaaaaccagacaggttggatatttggatcaccgtgttcatcgatagtggccaactgcaaattcaatttactttcaagaaatttctctgcttcttctttggtcatactaggaatttcggaagtagcactaataattttcataaaagataacttgcatacttgtagataaaatttccttccttctttatggcttcatttaacatcatttctttaacatgaatgaatgaagcactaaccaaattaaatattgttgaatcttgaggacgtgctttcatgtcttaacttttgtgtctatcctcatcatttaatgttgttaaagctgtaaaagatacttaatgattatgattaactaatatttcaataatagttattagtggaaaatggtcaaactttccctcttgtgggttccattaggaggttcatttaaaataacagatttctataaatcatcaactagtcgtatcttctattcgagtttgatactggccggatggtttccgttgcgtttctactacaaacgattgatttgtttatgttgcctttagaacatttttgttaacctcattagaagtttatgttttggattagattttaacctggcttgacatttcattaaatcttgaattctttttatacgtattcatttaaagttaattgcagaatatgaacaacaaagaagaaaaaggaggagatgtttggtccgaatggttagattttgatcactctaatatcgatgcaactactacgcttgacaaacccggagtctttaaggttcatgcaaacatgaaaattctatttattggaagtagtgccaacctaaaacaatctcttttagaatcgttatcagatccttgcataagcaaagcaaggagatttagttatttgattacggaaaacgccctacatgtaaaggatcaattgctaaaggaataccgtgaaagtcatggtggaagtttgcctacctgtatgaataaatgattgaatcaatgaatcctctaaaaactattctattcaaaggttaacttgatagaagtaaaattttagttgaaaaattgtagttgcaacatcgtgcaaattttgttatgatctgtctttatcatctataatggattagctcctcatccttagcaattgccttcaagacaatatcggtcctttaatgtggattctgccattatcatgcctgtatttgaaaattcattaatgtagaaatcgcatgatatcgtactatttctaattagattaccaataaccataatactaattattcttaaatatttatacaataataataaagcattgtcaacgtattccattgataaatcacttgttttagtccatggttcttgtcatggaggatggtgttggaataagatgaaaccttttctaaaggtttacgatcatgaaatctatactcctacacttaccggtttaggcgaaaggagtcatatattatatgaatctattaatttatctacccatattaatgacataattcaagtatttgagtatcaagatctttgtgatgttgtcttggtaggtcacagctatggagggatggtcattggcggcgtagcagagaaaatccctaataggatcaaatccatgatttttcttgacgcatatattccacaagatggtaagagtggatttgatctaatacctggtttaagagatatttatgagcaaagaagattaagagaagaaagtaaagattggcttgtactctcctacacaccggaggaatttggagttactaataaagatgattttaattggatgaaaagtcgtttatgtccaatgcctttccatactcatgatgaggcgttatcgatccaagaaatcaaatccaagaggttatcaagaacttatatcatatgtactgatttcggagattctatgtttcatagtatgaggtcaaaagaaacagacagctggggttattttgaacttcgaagaggtcatgattctatgattacggcaccagaagaactatctagattattgttaaagataataagtgatagtgattagtgatatattccgaattcaatttttcgatgaaacctgatcttaggaattccttttgatgtatatgacatcgaaatcacggatctgaatttacttatggcaataattctttgaggtattcatcgcaatttgttatcagggaaaatcttaatctcgaacttcaatgctaaattattatctgtactatgaaaagtcaacaatcaataatcactttactcaccataatttctttttcaatatcaattcttacttcatttcttcttaccactaacaccaaattatattctaaccctatttgcagtattgattgcaataataatgataatgataatgctaatagcgacttgccgttcctaatcaattcaaaaaatttgaccaaagtcctaatcggtaatactgtagatgccagatatgatactcatctcattactcttgataagactactcaaatgcctgaaatccatggattttatgacattgtttccacccagattagcaagatgtataacaatgatttggttttcaccattaatctggatgatgatccaaatcaaaataaaaagtatgaatcaacatatctttggctaataagtcatcttgatccagtaaataaccagaataaggtctttaccataattatcccaaactttggcagcgaatctaattttaatattaaaggatggtatttggcaatctatgataatatcaataacgaatattcatttcccttatcaagaatagacaaaatgactggtaataaagtggagattacaatcgatcctaatttcattggcggtatcctcgatttcaattacacaacagcagttatgattagggtaaatgatacttttcttgataagcagccagattatctaattgactcgtctcctgatgataataccttttggtcgaaatggtttgtttaagaatcatagatacattcattcgcatttcaaacaaactaaaggcgatattagtctcgctctaaagaataatccagaaaaccgatcttgaaatgtatacttttatcttacggggattcttggtttagtttcagtattctgttctaaatgaagagtttttttgatataatggacattcataatttggtcaatttgagtgatacaatgcatttcacaatctttatcaaattacttgagctttgataattatacataaagattaaaaactcatatgtataccaaccatttcattctcttcaggagatgcattccaatgttcatactttctgctcactgcggagaaatgagcaagatcttttggtgttgggggaggtaaagaaggtactgttctttaaccttccaatctcttgaaaaaattttcccatcttctttgtcgttagaatgtgaacgattgtggttgaacccgatacgttgcgccatgcgtgaggcgcattgcatggaacatgaatgtaatcacccgtatttgctttgatccatttgtgatcctcgttttcttttcttaagcagtctaattcgcctgagataacaaaaaaatcttctgtatctgcatgagagtgaaggggaacataaacatcgtcaggtattatccctcttagaatacagaagtcacttttagtgtccagcggagatgttagaaattctacagttggtccgaaaagttccaagatcttgccagtactaggattcttctcaagattcatgctactaccctgtgaattaatggtatttctattaaacatatctttgtaacccctgtccactcagaaaatatctagatcttcgtgttactaattaagacgctctcttctgtaaattctgttaagttattacataaataagataatttgcaatagctcacatctatgacaatagatgtaaccatattttgataaaaagggattagtattttatgtggtttgttgtagatagtattaatcagattcagcaaaaaatggaagcattatttggattatttttaatataaggaacaataaaattcacttcaatcttacctcattctgtaattattattcatatgagtgatattaaagctattttagttatctattaaatgagattctgatattaagatcttatctatcaggtaaaatgaaatacttgagtataagtttgtcatggctatcgaaacggacattggatgattaccttttttttacactctattgtgatatttagtttggatgcgctcagaatgagcaactgttgacatattatatatattattagtattttgatgcttatttttagctcctatcattaaatcattagcaggcatatctttcatttattagaccttgtgaaataagaacaaggtttcattttaatatataattaatttagcgaatagcaaatgctagtatcgtagcaatgtatggttcttgaatagttgataaagatatgcaaataactaatatatcaatagaaccaattattagtaataaacattcgcagtggacacattaggattaattaacagatataattcataaccgttcttcataatattccaatcaattattttctgaagtgttccactattcaaacatactatataagaagtacatcataaaaatatagtatcattttagataataaatatatgatataaattatacagtaaaatcgcatgaataaaatctacttatttgcaatcgcaagtattcttgcaactgcttctttaatggcgggcacttttacatcagcagcaatagcccaagctccaactaccccagatagtgaaatgggttctacaacagatccaatgtcattaaacatgactgcaacagatggaaatgttactggtgcagataactcaacagcacctatgtaagctagataactaacatagtggccacaaacatttttcaattctctatttttttctgttttggattttcagaactcattaaacagtattgtttgaccacataataaaaaaatgatttttcaaaagtaatgccgtttcaacgttgttttgtgaatcaatttgaggttctagtttaaatgttaccactctagcaattttgatttcatacagactttgaaggtattccgttttcttgtattcataaaagagataggcatcatctaatgatatatctatagttaaatgcataaggccaattaataataacctctaattatatgatatatccacattgtgtaaccaagtccatttaatgaagggcataattggtcggttctaagaacactaattgatgataactttactactgaaaatattaatgtatggttgaacacggattagttgattgatatattgaaactaatctttgatgggaatgtatacatctgtaggctaaactacagactactttaggtcagattgtggacgttagtatcaaatcttgctttctaactatcatgttatgactactaatttattaataagtatgactttacctatatattcgcatgcgctcttattttgattcagaattttactctcacttatcatatttttccttgctattacatgattgatttagaatggattttgaaaaaaagactttagattttgacaagggacgacttgtatctcttactgatggagtttttgcaataattatgacaatattggtgttcaacatcagcgtcccggaactcattttatttgaagggggagagtacgcatcagatagacttgctgctaaatttgttgatttatggcctgatttcctagcttacgtgattagcttttcaacacttggtgctttttgggttgcgcatcatagaattttccgttggatactttctgtagatcgccctttgatttggattaacatctcttttctaatgattattggattaatacctttctcgactactttgcttacacagtatatggatagtcaaaattcgatcttcgccttttcattcaatgcaattcttgcaggtttactaatatatgcaatatactactatgtcaaacatcaccccgaattagtggacaagtcggtacaggctttgattgagaaaagctccagtagacgtgtagtagccacgatattaacgtactcggtagctataggattttcatttatatacttgcctgctagtctatttcttttattactagttttgataccagagattataccagacaaatattttggaagaaagactgcgtagatactgacaaaatgaaatgtgtgagaaaatatttgtagcccaatacaagtaagaagaccagtttatgtgttacctcaaatgtaattctagttatgaatataaatccgctaatacgcgtggttgtattaggtccaaatccaattctccattttgatgaaggataaaaaaagcaattctattttttgtcccaatttatttacttcgatgatttaacaagattggttatatactcttttaacatattaaaggtaacattgaccaataaaattctcaggaatctggtcctttgttttggaatttcaacacttttactagttttgcctactttacaatcctcatttgcacatcagatatctctgtactttataaatggaaaagactatcttatggaggtggaatgggcaaatgaaccggtcgctgttgatgacaagacgaacatagtattaacagttgtctcaccaaatatgacagatccaactaatgcagaagcaaatggtacacaaccaattacaggacttgaaaattcattaaaggtagacataatggctggaaataaaaccttatcatcaaacctagatccagcatttggagaactgggtgtatatgaatcagagacattttatcctacaattccaacaacatttagttttagagtatatggagacatgaacggaacaagtttcgataacacagttagttgtaatccaattttaggtgaggatgttcctccagataactctactgtaaaaatctccaatggagttgagagaatggctttgattggtggactagaatgtccagacgatagaatcggatttccagaaccctatacatcccaacacgaaattgttcaagcgctaaatggaaccgacacataacttcctttttttatgtctagttttaccaaaatctaggttaagtgagaaatagtaaaactagtgagtaggaaatttagtaatatctaataataataacggtatcgttgtttactcgttttataattcattaaatagtaatcaacttgaaagatagaagaacatctatcatgttatttcatgatttaaactgctggaataactgtccaggttgtaaacacgatgttaataccagtccaatatttataagtaataaataccatactacccacattcttttaaattgacttttaattaattagtctaatactgaatgttaaatactatactatactaaagccataaatgaggaattcaaatatcaaatcagaactgcattacatacattttcataaaatatccataaaattggttctggtaattatagttacaggatttttaggtatttcgtcttttaatttgacccatagtaatgtaaccgcccagactcttcaagcaaagtgtactccagatacgggaataaatgtatccaggtctaactgtttctcgaacacccccactaatccggtgtacaatgttaccaatactgagaatgttaggccaccatctgaaaatacgcttacttactctaataatacaaactctaatacaaatacatccgccagataatctaatcactaacagcttatgacttctatgatttcatcaataaataaagatgttcctgagattccgttttctttattttacactttataatataatatgattcttcaattaatgatgctcctatttattttgcagaataacattttattaaaaatgattctcgatggttcgatagatcttattcatctttctgtggattcgttcatataatagagaaacacaatccaaaggcttaacgtaatggccctttttacttttaatgaagagtaaacccactaacgatcaaaagaagtatgctgcattagcacgcatggtaaaagaaaaagcattgccagatcatacttgtgcaatgttattgaatatagacatgcctctgctatcactagacaagatggtttggctctaaccacaacactgtcacaatttaaatttactaccctgtccatcatcggccctgcctgattatcatcattaagatggttcgtttcgcatgtcgtactcatcatgtcgacaaaaccacagtcccatttcgttgcgccccttcggcgcccggtcgagccactgatacatcccccatagcgcatcaaggcctcgcgcataggcggagtaggtgtggtagacaacaccatcagaaaatgcaaacgcgctcatacctggtgcctcacgagtgtaggttaggatgtcagtgccactcatggccgcgaacttatttgagcctgcctcagagtctgagatcgcgctgagtgcgcggtagttgtaatctacactgccggagagttgttgctcctctgtgaaggacgtattgaagtcgtagttaaagtcgctgtccagagatgacacccaagtaaacgtccagcccatacggcgtttataggcctgaagcgcagcgagtggggcacgtgagacagcaatcattgctacatcgtggtgttctagatgcacggcatatccgttgaagccgtccgcgatggcagagcatgcggggcagccacccgtatagtcgggaccaaacatgaagtgataaacgagaagctgcgagcgtcctctgaatagatcggctagagacatagtgccatcatcagtctcaaaaaggtactttttgtcaattcgaacccacggtagcctctgccgccattgtgccagttcgtcgctacgccgggttagctccttctcggctttgagtagctccagccggccggcgagccactcttctcgtgttccgatcttgtgatcagtcattgtttctctccttcttgccacagaaaaaataatattctataatatatacttccagttgacgtatcgtcattttcactctgcataagtcatcagaaagaacaaattatataagatgcacctctctgttgcacgatccactttgatttaattcatttaaatccggatatagtttttttggatattctttagttcaattagtaatagaatcacaacagacccgaataaccgtgaaaggcagcactgatttattcaaaaggttgttaaagatagatttcattaaataataattgtaagaatataacactaccatgtcaaatataatgaataatatcgaccttgacaaaatacaaaaaaccatagaaagtggacataaagacccacaatttttaaagaaaccaataagattggaaggggaatggaattttgacattcaaaaaggataccaattcaaaacagaactagcatatgagaaaggtaaagaagtgattgaaatagattcgccgtccttcttaggaggcagtggtaacagattgggacctatgggatattgtgtggtaggaataacctcttgttttattaccacattagtaagtattttatcaagccatggaatcaaactcaataaactacgaataaatgcagaatgtaacgttaattttgccaagacatttgatatttcagatgaacctattacagaagggataaattttgaaattgatattggtaaaaatgagcacgaaggggataatactacaaatgaccaaaaaattcgagaactgattcttatggctgaagagagatgtcctgctatttacagtatgagtcacataattaaggttagcgcaaaattgaaataaataagagtcaaatttaggaaaatactatcctttcaatcttattaaacgatgttactaagatagtcgacgatgctggtaagtttagcagttaataatttacgagtcgaaatgtcagaacgaaatttataaaaacataacagtctaatttatagaaaattatcttttacaggataaactaaatatggttgaaaggattagaaagatttagcctcaggggttaattttaaattccatttggcttccatttatgacagtgtatatgaaccacccttacaaatgtccccatatatgtaaattatatagatgatagacatcgtgcatcactatttttaaatctcaaataataaataatatttggaattaaatggagttctttgcaatccatggtgagatttctcaggaatttattatatgacaacttaataaattcatgttcctctatcgaatatccttcaatctgtcttattcttatgttgaagattgttgggatggtgaatgaaaaaccaatagtaccgctggttttgtattgataaactcaactgcagaaaacgacaatgatatcactgttgttactaatgctagctgctgcgttttatcatataaacaaaaatgttcatagtttcttttaacctctataagagatgactactttgattcgttgccaaaagggacaaaattattttgttgcttgctgtttgtcttcttcgttaccagtcggctgtgaatgcggtttcggaaggaggggagtgatcgtttttgatatcacgaaaccgatgactgccccaataacaatcactggcaaaagatctgtctgtcctcccataaatcctagtaagagagctattgtcaaaggaagcgggaaaacagcacacgcaactgctgccatccctacggttacccctacaccttctggaatgaatgtaaggcctttagaaatcgcaagccctaacgctccacctataaataataatgggaatatgggtccaccatcaaatcctgtggcaaatgatgtgctagttatgagggctttaacaacaaccataataagtagaattcctatgccaaaggcggcagggttatggataatttgtaatagttgattttgaccagagtacagagtcagtgggaggaacgttccaatgaggcctatgattataccacctatgaccgcacggctaatcggtctattggcaagcggggcaaagacacggtgaacaataccgattattaatttaaacattatcccgacaaacccaccaattattccaacaagcaaagcccaccacaaatcaacaaggcgtgctgaagcatagtcagggaagctgtaaattccaagaaatgaatcctgcaatattgcggtgtagacgccgtatccaacagcagcagccaataggcctggaatcaaatgacgagagagatccagctctttgatgaacatgtactcgatggctccagcagctccaataactggtgaaccaaagaagccaccaaaagctccagctatggaactgtaaacaagtatctgaacatcatctttattgcgcctaagtcgttctgaaagaatggttccaaagcctccagtcagaaaagttagaggcccttcaggaccaaggggagcaccactccatagagatatgaaggcttgaagcataatgctcggcactttgcgaggattgattcggccagtttgggcatattggctctgcgcaactccaggtccaccgttctcaccaaaaaatttgataacaaggccgattaataccccagcagtagtgagtaagactagtggccatatgttgatattaagtactatgagacttacttgttcaaagatcttgatgccttgagtgtagagtgttatataacccactgtaatcaaggaggataaggcaccgaacagtgctgcatagatcatcaatatgaaaaagctgttcttcgaaggaacgtccggttcgactgtcatggtagactaccatctccaatgactgccttgattgtgtttagagaagccactgcctctttagtgatccctctacaagttttccccttttcagctaatgccaagacaagttcctcttgctgctttctgtcaatttaccacctaatttatatcttgactggtttattatttgctatctataatttaacacgaaaaattatgcaatatgaaagtccgacaagatcaggataagattaaatcccttcttttgattgcctattgataaagaatcatttaagacgcatttaaaatgatatggtagtatataacgggcttggtggttctgatgtattatctccactaaagcaggacccgatcactgtggatctgaattttttaaaatctttggttctattgaacttgataactataattctcttactgtattccatcattttgattcggtcctgttagatagacacacacactcacacacaaacacaaaagagcaatcaaaggtgttttcttgaagctaaggttataaggtcgatatttatacagactgtatgtctattttaggaaatgtaggtggtatcaataatgatcttaaaaggacagcgattgcaatcatgaggaagttgaatagtgaacatattgttcaaactccttgggtgtcaagacagacattgcaagatagtaccagagcagttcatacatatttcaatcaagctattctaatcttacaaaacaatagattaatagaaatgaatgataaaaatgaatttcaaataactcaacgtggtattgctgatttagagataatagagagacaatagactatgaaataaaatgtatatattttcaaccacgtattaattcagattattcttatcctgtgaattgctgaatcattttattttgaattctaaaagaattaagtgactgatatgaaatctgatccgaatttcgtttactcattttggagaatccatatttttgaaaaaggcccgataaatacaatatttgaaataatttgaaataatttgaaataatttgtactacttttctgtgtgggttattcgataaatgttcccatcaaaataagttagtatatacaaattaccatccaatccagtttcaatatccgtaattcttccatcaaatccttttgcaaatataactttttctaattcgtccttaccatccgctactaaatcttgcagccctctttcattcctatcatcatgaacacttttatttatatcaattccagatctgtttgaatctattttaaggaaatacaaattcccgttattaatgtctcctacgaatatgttattttccaggtcatcgcctagcaacgaagattctaaaaattcaatgtctgttaccccaacaggcagcctccaactaaattctggatctgaatagtgagaaccatccaaaacaacaagatcggaaactaaagtgtcgttatttcttgagatagggcccattattttggaccatccactattaaaacctggttggacaaggttaatttcatcatagttgtcctcgccgttttcagtatcccatagttttcccgttagaggatcaatatctattccaaaactatttctaattccgtatgcataataatattctgtcaaattaagtttagcactattagaatgatatggatagagtggattatgggatggcatgaacgattctattgatggattcattcggataatgacggaggaattattaggtatagaagtagatggattttttccctccggatagttttggagtgtattatttatagccgtgaggtctcctattattgcatataaattacctaatttatccatgtgtattttcccaccgttgtgatagggcccaggttctgcgggcatatccataataagtcttggatttgagaaagaacctaatccatcccaagcatattcataaaccctattccggatagtataattcgaatcttctagttgtactttgagattattatccatagggtcgtatattttctcagtaaaatataggtaaatcatatagttggaatcgtgactcatgggcttatgagaggcgattaatacatccctgtcagagactgggtaagaggttgaattaaaatttagataatctacttgagtcttttttttagattcgtatttgcttgatgaggtaatccccaacaaaccctgttctttttcatttgaaatgttatttatcgtgtaaattggatctttttgcaatgtgccattagatatcaggcgaacattaccttcatccttctccgttactagtatggaattattatcaacaaatatcatgctagtgggaaacgacaaacccgtcacataaagatccatgttaatcctatccttgtaatttgggctaatttctatttgtttcttgtcttgtagtggatttatataactttcaataatatgataataatcaaaatatttgatcacaatgattgtaatgacaattaaggcaattaagaacataacaagtcccttcatccaaatacaatgttaatttatgaattatctcatgtatttgttttacctatcttgtgttttcttatcgttctaaaaactttatttctaggataaagtcaatcaatgatttctcctgtacttttcatttaattatatttgttaaattttagtaacgcaaagtcttgagatttagggtccaaattccataataaagatataatagcctttttcctttgtatgattcatacttgatgattgtagataattcatacatatcccaaatctctttccttatatggatgggagatgagtcaccaataatgccaactccaccaataggaggcataatagggtcaggaaaatacagacaataattctcttctgatttccgtttttttaatgaaatgtgggtagataatataatatgagattctttccaagtttcttaaaaatctcgtactaataccattatttaataagtggatttttagtttgcattaagacaaataaatgtcaaaaaatagttactaaaatggattactggcccggtggttttaataattgatacgaatccactttttcaacaaaaataaactattttaatctagagaaataagattattcttttaaattaattagttaactcgattttgacctactatcataattgctccgacattcatattattctttaatggattaatggtctcaatttcatttgcgtgagtctgaaaacataactgtaaatgggcataacaataatattttgaacaacgaaggcatcgtgcaatgggtttggccgaacagctatcatatatacatctagtaaattttatagagtgcatttagttcctttctttctttctttctttctttctccttcttagccatgctcaattcaagtttatcagtggtacattttaatcgattcctgcgtatttggatttgtgatagcatcaattgcttcctatcgatacatatgcttttaattggttcagtaaatctatacaatcctactgtcacttttacaaccacaaattttcccctcacaaatcactcgtgattcatacatagaaatattcatttttcattactcattctaacaatgttcttacttgacatgattctatacattgttgggagaatagtaagataatttagtattattattagtcgaatgtctgagtttttgtatgagtaattctgcataattctctatcagaaagatactagtatcctttcctgaatcttttcgatttgataattcctgtttcgtattattagtacctagtacatctgattcaatagtcccattaggctcatctctctcattcaaactatttgttttgtagtcatttcgatcgatagacaacccattcctgatctgattggtattttttgacaattcattatagtatgtattcagttgtcgcccttttagtctaggtatcctagatattattttcaccatatttacacttccatagcaaagctataaaaaaagtgaagtactctagttgaggatccatgtaacattattactgcttcatataacttatgtcatgaatcctcaaatactactctcctaaaataattttcaatgataatgcgtttaattcttctttaggtatactcaaatttaagacagtatagaacaatcctttatccattaataactatattaatggatctacgttagtttttcaatctttcgatattcaaactattacgaaatgatatagaccataatggattggtaattattttttagaaaattatggaaaaataaagaatggattattatggaccgcaacatataagaagatacattccgctgtgaaaagattcttcagcagaatcatatgcttgtctgtttatctctttgcaagcccgcatatattctgaccaaattgcgaagagtgtcagaatgtgtgaggcaggactgtattctttactcatatatacaattccgaagaaaaaatatattgaatttgctaactaactgcaatattctaatattctaataattttggaattatccagcaagttattataaaatttataaaaattatataatgtattataattattataaatatctattaacaattttataaatttacagtaagcctagtgggcttggaatcaataggtatgtgtgatctgctactttattttgttattatgatcggttgaaacaagatatatctcattttggcctattattcttctcgattgtaataccttgatcaagttacaaagataagaatttaagcgtagcacacacttattattatggataaaatatccaattccaaagatgagacagacgctcttcacaatgttgaaggttttgtgttagagaaattatctaccaagtttgactccaaaaactcttcaaccagcattggagacttaatggattccatagataaaactatgttccctctactagatcaagcaattgaagatttgattgctcaaagtctcatacattctgaagatggcgaaaattaccaaattactccggatggtattaatgaactagaaaatagaaagaaagaggcgataccacttagctgatgaaaggtttttacatcgttagataccaagccttgatggataagtgaataatatacaaattatattagtgacatattacctgggtctaactttttcaaactttcaaatttcaatgataaattaaaagatgcaccaaatgattaggggttaaatactatgttatataaaatagtctaccttatgtggaggcaccgaatcgttaagaatcggttgttttctatataaggtgtgataaggttacaatcatgccataagtttaccaccagtaggaaaacaaaagcatgagaaggtctgaggcatgctatataatagtgatgctaagtactatcataaaaaacaaggcctttattgaaaccttattgcatttcaaaaaagttgtcctgaatgataacttacagatatacaacacatttaatgtctgacaaggatatagaaaatccagttatagctgttctctaaaagaattgaaggggaactgcagtttatataaaagtagattgattttacaatatttagttactgtcttggggcatagaatattatgaatgcacctataagaactataaaacctccaactatttcaaatctgtcgggtctttttttgtctatcagcaaaccccaaatgattgccatcacaacaaatattcctccgtaagcagcatacactctaccaaaatttgatggctgaagagttggaattattccgtatacaactagtatgatacctccaacaagtccaatgcctatcgtttttctttctcttagccattgccatacaagatatcctcctcctatttcagcaattgcagcaaccaaaaacaatccgaaggttgaaatgataaagattaggttataattatccggaagtgttgattccaattttttccccccttttgcgtggatagtaaaaaataatgatgactccaagagcagcgacagtagttccaactatatcataaatatccggaatcaatccttcaaagagatagccccagcctaaagccattataataaaaattcctccataagctgcatatgttctgtggaaatgtgttttttgtaatgtaggaattacgccatacaaaaataaaacaaaaccgcctagtactccaaatatccaactatagctttcccttaaccataaccataccaggtaaccgcctcctatctcacatacgccagcaataaaaaagaaaaataatgaataaaaaatgtcctttattctaatatacaactatcaatttgatgatttgatttaacttatttatctatttgatcattttttcatccgatttagtaattggcaatagattcttcaagatctcgacccttaaggttacctattgctttccttttatcagatgaagattttatgattctttttaaaagtccatagaaactaagatattgataatagggttttatagcattctgtaatagaaacctgtaggaataaggaaatatacttgagatattattttctctctactaatcaatcaagtattctaaagtttaaaatgttttattattaaatattcataaaagattgtaaactccttctacctagccacataaaatcagacaatcagacaaaatctgattgttaatcatacaaataatctttacattttggattttcacaactatattcctggggaagaatattatttcaaatgcttaaaacgattagtttttcagtgcccttcttgcaaatcttatgatgagatagccaataatgctattctatttaaaaccaaagtcgaactgataagatacaaaacctatttcaagtgaggggttaaatacatttatcttaatgatttttaaaaagcatcaatggtaaaagtctctatatttattggtaccagtctagatggattcattgcaagagagaatggagatatagactggttagatgatgctaacaagaaagtaactcttgatgagaattttggattcaaaagtttcctagagtctgtggatcaaataattatggggaggaaaactttcgagcaggtaatgacctttgacaagtggccgtataataataccaaaatgattgtattgacctcaaagaatgttgaaattcctgagaaattaaaggaaactgtaacaacatctaacatgtcatcacctaaacaattggttaaagagctatcttatcaatctgttaatcatatatatgtagatgggggcatggtgattcaggattttttatcagcaagattggttgacgaaattactgttactatagtaccaattcttataggaaaaggaaaatcatttagtggattattatcaaaagatttgtctttgcaacatttaaaaacgacagtatatgactttggtttcgttcaaaacaaatacaaggtcaataaataagaatatgaataggatttatagaatttcgttaatatatatattcatcatacatgaccatgataaggatttttaactgttcctcatgcatagttatgtggacaaattcgataccttagattcttttaagatctcttcattgtactgatatagccgttgacggctgttaagattttgatatcgttattcatgaattatttttggcaactcttttccctttggaataaagtgtatagataatgaattgacacattcccgtgtatttttatctgtcaaatgttctcccagaaattcatgtcctagatgtgcaccacaattttcacattctatttctgttcttattccatcaggatcaggtatacgttttattgcattttgaatgctttcatcaaagcttggccatccacaccctgcatcaaacttgcttttggatgaaaagagggggatattgcatcttcgacagataaacgttccatcttcataaaaattgtcatacttaccaatgaagggatcttcagtagctttatctacaattattctctcttcttctggtgttagcttattgtaactcatactttatagccttctcagtcgaggatttaagatcttgtatatattgttatgtattctctttgcgatggtagtgattcaaaattattttgatattggattatttgaaatctttgggcattaactgattactatttttttaaatcgctcatacctgtaacgtttacatttggtaaatgttagagaatgagaagatgatctgattgtcaaaatgtctagatgactattatgactcacaactcgaactttagagaaaaaaatcttgactgagggtctaggatcgataccgtttggaatgatttagtttgacttaattattctcggataacaatcatttgtaaaggaaaactctagtaaacttttgatcaatatgagttgattaggatgcataaatctcttgctgggtattaaaaaccaatggatgcctgtgtttatctagtatattgattacgaatccttacaatgtctaaaaatgataaaaaagaaattaatgacgaaacttctttagttaacaaaaatatcgagaagcaacaagatatctaccgaaataatcaaagagtatataatagaattgtagaacaaaatactgaatcacttgaacaagcttttgatgagtcaaaaaaaagtatagatgaaagtattagagaagcaagaaatcagattccacgttatactgaaaccgttaatcaagttcaagaacaaacacttcaagctactaaagatattgcagtaagctacctcgaatatcaaaaacaaacaattgattcttttcaatcaatatctaccccatatctatacaatgtaaataaccaattattgaatagccaagattactttagaagaatgccagagatgtactcgaaattggtgaataattatgcagaaaataccatagcaatgagtagaatttttaatgatatggcattttctaatattgaattattcaaaaatgtagttgataacacaaagaaacaatctaaacatcttgcagaaataggaaaaagaaatgtatcagcatatgagagaattgaaagagacaacaacgatgcattgttatcaactcaaaaaaattatcagtctaaaaattagatgagaaaaattaaatatcattttttcttaaagctattggcaagattaactaacttccaaagaaataatattttttgaatttattggtttggttaattaataaactaatctaatagattagctaaaaatgtttataaaatccttttcaaaattttgaggtgtcatgaaggttttattgcgtaatcgtgatgttacattgaaatgctcgccagtgcttttgcaattacaatttattttaagatagaattctatcactattaatatcatttttgtggggttttttgatttttatggtaacggtaaatgaacagaaactaacgtagataacacaaaaaaatatttgtgtcgtaacgatatagtttctaaatttctagtgacgatgagactgttccttcaccaatagcgatagtattaataatttgtctttgcttctttggatcactttttggaattctaaaaggggttaaaattttgccggaggaaaagcacgtaacttgggaccaaaacttttcatttgattggttatgctgggggaaggcccaatatagatgaagcttattatgataaagtttttgtattgtagtattattgataccagtttacattttaaaaaaaggatggatgagtgtattagttattgttggggcaactgatacttccagttaaccacaacattgtctattagaaagttgtcttctgtattcggattccttaagaactgtatactgttctggccctgttttagcacattctcatccaacaagactgttagtgttgcccagtttgcagatccagaatttccaaagttgccgccgggactagttacactttgtccattaattattattgtatgtccctcaaagtacaatccatatatttgtaccaagagatatccacttccatcgggtatgctgtcaattgtaaaattaaaagtgtcggacacatctcccctgtatggataacctggagcaaatatgtcgtttttattgtctccaaggtgttgctggataggaactatcgcaaaatccgaagcttgcaaatgagtcgttgtcgttgttacgttttggccacttgcaacatagactgacacacctccaaagctcaccattccaaataatgcgatgatgctaacaaaaacaataggtacttttaattgaactacctcctttacatttgactgatttgccatattgacatattgatcatgtataattaaaatttatataaatgaagtaaatatgaatcctaaatatcggtgatggataatctcgtattgagagtgcaaataacctttggagcaggaaattatgaagtagtacaaatcaaaactggaactatcattgatggaaatgtttactacactgattatagttttcctagaaaattatttttataattttccactattcaagaagatgttggattcattataagtcagataaagcgcaatcgagggaatattaatgtcggtactagaataggtatctggctcagtggacttcaaatccacgcggtatatatgaactgttaattaattaaataaatatttattcaaagaaacctatttagtaattttataatataacagcaagattataacaggtatggtggacttcaggacgatataagtccatatcttttttagttttgctgattattacacaatccgataaaatcggccttacaaaagaaattgcttttttactattttgaccgcacataattcgtttggaagcggatgaagattatttacagtcttgttgttttgataacttgtccgcgactctaagaggttctggaatgaattgatttgttcttgtcattgatttaactaattgtattgacgttgttaaactaatcttatgtccaacactgatgtatgcaattttattcgagttgtttttaccctttaatgcgtacccaagaatttcacctttatggcttacaaagttgcttgatttgacacaaccgcataacaaattttttgcgacacctattgttggcaagtttgtaactatgcctatgtaacttgctaacccacatctcctaggatgaagtatcccatgaccgtccactagcaaaagttggaaaggctttgtgatcaatttcaaagtttgaaggatgggcgcagattcccttagaataaacaagcctgggatatatggattctttatctcgcttttgctaatggctgtctctgtaatttcaaacttttctttattgattacaacagctgaacagaacgcagttttttccctgtaagatacatctactccacaaataaattcgaagttactatcaaaatcatctctaactataactctttttgaaaattcgttttgtaattttattaattcatcgaagaaagttttgttactgttactgttgtccaattctgatatattccgttgcatatgggaactctatgggaacaaatccttcattcagagggtttatactatttgttaacttccgtgagggatatgattcaagattaaatacaattttagtgcatgcgatgtttaacatattaaagatggattttttttaattccgaaataattcgaggtattaaggattaatctatttggtaaatggatccgcttgtccctctatttgaattccgcaaaatggacaatagataatatcgtaattatggagttttggatctatctctaactccatagtaccgtcgtgttctatcacctttaaccatcctttttgactaatacttgatatccaaaatgcattttcccttatcataattttcattccatcacaacattcacgtatcttcatatataccatctaatacagattcaaatttaacgattatctttaattttgggatgaataatactaaattgatttatagcggatatctacaaagataaagatataatttatctcgatacttcgagatgatgtcgatactttagaataggttgctttatctagtaaatattattaattttatatttacttcaaaaagcaatggttttatttttttagggtactagtagtggattttttcacattaaatttaccttcgacaaaaacgggttcatcaattccccaaccccattttttagtaggccttattcttatatatcgagattgtggatggtccgtattggacatataccctccttgacgatcaacggtgtctgctattccataaatcctaatacctcgtgggtcccaaggattgatagtctttaaatcatcgataactagggcaactttactgttctttagaatatttttgtatttagtagattttaaaatatttattccacccacataaaagtactctccatcaaaatcaaaacccacaggagcaacatctggttgacaacttgcaatatctgagggggaaactgcggaggcagtagctattcttgcaagtctttgtgatttaatatactccttttctttttcagtgaacaagtagtatctaatttaattaatcctcattgcatttaaaattagtctatgaataatattatcacataatattatctctcctccggtagttgataatatgtttacgtttgcctagtttttttgataaatagtaaattacaatgggtccggtgggcttaagtcccgtatactatgcgggttcggtagaaatcatgaggatatccacatgggtttaacaggtttttataactggagtcagtccggtgaatggattgataatctgagaatatttgattttattactaatataacttatttatattctgaccttttgttttcatcatattgtcaaatactgaaatcttatatttacaggcacaaaaacgataataaaatatcttgataattactctaacccaattttaattttagtgtaataaaaaaaaaccatacacacaattgttgattattgtaggtattatcggcacttgctatttgagtttatttgaccacttggtgtaattattaccttacaatctccaaagttacaatgttcagctccttgaccacttgaccctttgctatcacaaataccatgctggtggcagaaacctgttgagatatttgaccgactaaggctgtaaagcctgcaagcattgaaataattacgattgtggcaataattttcgaattcatcaaagtgcctgcaataacgtaaaattaaaggattttggattagaatgcatttttgaatttaattgtaatagtttgataattccatatgaaatgtaacaaataagttagtttttaatatatactatcatatataaaaaataaaaggtcgaaaattaatgtttttaattgtattttgattttataagatgaacaaataactgcaagttgatataaagttcatcgtaattagatatttagttatacgggaatggataaattgttctaagatacaatactatcattgaccttttttaaaaaaattttatcaacaatgagaggcaaatctgagcatgataaatctgtatctgaaaagtcatcggcaaacataaccaattcctttattgatagcgatgctatagaatcactatcaagagcaagcatcaaacttgatgaaaagtttggactaaaaagttcaggaaaatgcggaatttgcgtaaaagctgttgaaacagaacaatttaaagaaatgaaagaatttatagacaaatttctttcaattgcaacagcaaacaaagagaaaagtgaaatagctatttcctatagttcgttaattgatgagtatgggtatctatggttcttattaaaagggactaaattagaggatctgataagctcgatatcatccataggtgatacaatccatgaaaagggtttttcaaagcaactgttagcaacaatatttgagtttacttcaggatatcaaaatgacggtttcaaaaataatggcagtggttctaaccgacaatatttaatttacaatgataagtcggacaaattttatccttttgtacctattagtgataaatctcatgatactaatctaaagaaacgcaatcatgatcaggagattaaactaatggaagaattatcgaatgaaatcatatttgaaaaagatttgagcaaatggtttcctgtttggaatataccattctgacttttttgtaattgatccgcacccatctttttattttattattccttcatctttgaatacattttgtgcttcgtcaacagaaatgtccggctgtggaatataaaggttagattttactatatctgtttccattacgggccgaccgttattttttataaatgatataatttcctctaatttctcttttagttcctttttaactacttcagggttagattgaccattactatgatttttcagaatgttgacaaccttattgtcaatatcattaatttgtgttaatagattattgtcaatttcatattgacccccaccagaaattctaatgatggttatgttttcctttgttttagtttctacatttttgatagtggatgaatctttttcaacagtgtttgacgcatttgtctgcagatcatttttcattttcttaatctcttcttcgactgcttgactagatgagaccttattcagctcgctctctatgtcggaatcttttgaggatggaaaggatgaagcaaagtctgtaagagttcctgagtcaatcatttcatcaagtgcttgcgcctttgccttcatattttcagttttttcttccaccctattcaaaatattacctacatcgctaaactcttcagaaagccccgtgatgttttctttaatttttacttgagcctctgccgcggaatattcagctttaattatttcttttctagtcttaaattcttgaattttagttgagagacgcctctctgcgtcttccaattttgcctggtctttttctattcccgatatttgagattcgagctcttttacttgcaccatcagagcattttttctttcgagagcaagtttagttagatcctccctcttagaaattaatgaacgtttagcttgatcctctaacgtatttacatttgccaatagttttgccttttgcatttccagtcttttttttgatgtaactacctgagcaatatcttgtcttaatttaattattaattcattttgtttttcaaatgaataatttagcatttcttgtggattttcaagatcatctgcgattttactcgcttttgctttaaaaattgtagagaatcgttctattagtccagtcatgattctacgtatgaagatttttgtattaaaatatacctatcgtattttgataatccactaataaaagacaaaataaaaatcatatatccgtataatatctatatccctaattgttgataacgaaaaaagcaattttaacattcggagtcataattcttgttattgcgattctgcttttgctttccagcaataatatatttattccttatcctgaccagttcggtggaactgagattccagattccagtgatgagccattctcatcgatacctgatcaagatttgcgatcgtatgattcagaaccttatcaaatatttccagattccagtgatgagccattctcatcgatacctgatcaagatttgcgatcgtatgattcagaaccttatcaaatatttccagattccagtgatgagccattctcatcgatacctgatcaagatttgcgatcgtatgattcagaaccttatcaaatatttccagattccagtgatgagccattctcatcgatacctgatcaagatttgcgatcgtatgattcagagtttaattgataaatgtgatctggatctttagctttagtttttaaatcaataacccctgattaattgtggtttttctcaattcaatccgatatttaacaaatacaaaacttcgcaagcatccaacaactgacaatattatggggatacccaattgcgactcagagccctccagagactggtacggcagaatatagttgtccacccgattctaaaaaatgtaactgtagcagtgtgactgattgctttagtatgggaaaagatggagtttgtaagagtggaacaattaagcctgacggcagtggtggagctacccgtactagaaaatactaatttttttcaatatatcgaagacgcattattctctagtttgcgagatgattgcactagcgagctccatatgaaataagaaaaggattctattagaccggtgggattaagccccttatggtataagggttcggttgaaatgacgcagatatctagtctattaaaggattataagatggcacttattatcaaaaatattttgcggggcttttgacatcatgtgattttgttttcttttctttatcattaattagataatattttatattctatgagacaagataattaggaacaatctttccagacatccgatccgtagtcccacaacaagctttggaatacgtttaggtaagcgaactaggattatttcctattacatgtcaattaatcaatacttggctcgaatagtgggatatgcggtaaaaatgacatggaactatcataacatattaatggttcaggattcagcctcagtgaccaatctctttatgtcaagaggtttgtgaaacaaaaatgaataaatgaaaaagggtaatcttacagactattgtcttgcctaaagaaaaaggcggtggacttaatagttaagtccagggcccaaagcattggtttcatctgtgatacagaaacttagcgcatccttttgtatttgagtaaacccgggttgggcgcctgccaagatgctattaatttcgtccaataccaattgtctatcgtttcgagtcatgacctcgttttccattaaattccatacctctttcatatcagttattggaccactgcctccagctatattttcatttattgatgttagttcgttgttcgcagctagtaaggagaaaaagctctgaacactttttgtgtaattttgaacatcgccggtgcttaccttcgcttctccaactatcttaaaacaatcagttgtggcattactgagacctttgaaatgtgagtgtataggacaagtatctatgttttcgtttgtcctgaaacaatcatttgggtcgtttccttggttctgggctaccacagacgaatctgaaacatttccgggtgttaaatgaggatgtttgcccaagccagataattccgctaccacagacgaatctgaaagattaccgaggctttgcgctaccacaaacgaatctgaaataaaggttactgctgtgagtccggctacgatagaggctagcactacaaatatagccgctgcttttccttcttggggcataattgtctcaaacatgctactaatcttcaacaacatcaacacctatttaacgacctcaaagacacccatcatgccaaagtccccatggaacatcaggtggcagtgatatacggcttttccaacaaaatcatcaaacgggattcgaatgaccacctcgccttcagttggaatcataactatatcttgatatccgtgagcatcatatggtattccgttaactgacattacctgaaagtcatttacatggatatgaaatggatgaagattgccagatgagattttatcaaggtttaccaacttccactcctctacagttccaagtttagctttaatgtctgttctgttaggatcaaaggtcgtgttatttatctcgtatatataatctctatcatttgatgagaaattaaggactctatgattagttatgttcgcattactcaggtctctctctggaattaggcttgttggaaggatatcggtaggtttcacatctgtttggttgccttgtacatttacagttgcaacgtgtgaatcgtacggtgcagtaaaggggttagcaggaactcctaatggaatatacccactcccgttggcagttaccaatacatcaaaccgttttcccgatgggaagaaaagagtatcattattccatacctcccaaacggggcttccatcttctgttataacatggaatgaattgcctgggagtgtaagtgtgtattcattctcagaaccgatgttggcaaggcgccataactgggtctcgcctgatttaatgttgataaccggattgacttccccgttaacagttaggctttcatggcctgacattgtgttactcaaattatgtgtagtaacccatagatcgtcaaacggaaaatccttcatggcaacggcctgtgtagtgatattctgtaatggctctggcaataacttttctaaaccttcaactataaacaagccagacagacctcccgaaacttgtccataagaaagcatatgcatatgtgaatgataccataacgtgcctggatcgtgatcctcgggaagtttgaccgtataatgctgtgtcttgccaggctcaacctcaagaaatatgttatccgaattatttgcaggagacgcatgaactccatggaaatggaggttggtagactcattgagattgtttaccaaatcaagttcaagtgtatccccaggatagagatgcaaagcaggtcccatgagagaaccattgtataccattccagtgattgtcttgttgtccactttacctatcttgtaatctgcaacgagtgtagtttgcaaaactccatctttgctgtatacgtctacaggctttgaaaagttcatcccagccaaatgatccttatcatttatttttgctaatacttgttcgctataaatatcagcaaaaggatcggattgattttgggcgaaaacattataatttgaatgatcaaatgcaaacatcaccaaaacaagcatcgatatagtaagggtacatagtaaggtacaagtcttgatcgggggtcgtatgtgttggatcatcgaattactccctccattaattgaccattccaaacaattccgcttacattagattccatatcgtattttctattataataataatttctagtgctcagactcatgtatattacctagttctagtaattagtatttaacttttgtttaattttgccatttcttgaccactgatacaaattattatagtacatcagaattatgaatgaaaaatggaggaaaatccagaattataacaagtattactatcaggatttaaaacaaaaaatattttaatgtaaagtgccagcctcaagagtgcacggaatttgatatatatgacaatacgtcgccaaatgagaggaattcagacaatatgaatagaatggagtatgattagtggcaaaattgacatggaactttaatcaatcgctgatacatatccatgtctttgtgttattttagtgtcaaaatccaaaaacgataatcaaaattagcccttagcattagcagtcatataaaatgctttaagaattgcgcgattaagttccgtatggtataagggttcggatacaaaacggacgaatctgaagatgaaatatcaagataagaattcggtgggcttctaatctatgtggtttaggggaattgcaacattatttattatttgatgaaaggtctatttcctgacaggaagttaattgtatctctctaaatccactcgtgtcacagagcctgctatgatgacaattctagcagtcttagatagtcaagaatggatacgatatattaaaacagaatgcaattacttaaactagtttggtcgtatccaggacagtgtaataatcttgtttgaaataataccatctagaaatatcataatagagctctaattggtcaaatgccgctaatgagtaactcttacctaatagaactggataaaaggtatcaagtctcttgataatatatatatcgaaaattaacaaacaaattgtaaacaatagaataaagagtatgtttctcacccctaaaaagattataacatgtgacagtatgaatgtgacaaacgatctgaataattctattagcacagaaccaaaatatctattcatttatctattcatttatctattttcaaattttacattctaatagttgaaaatgaagtgaagaggaaagatatcaaacgggcccggtgggcttcgaatcccgctacaaatgagaaaagagatcttaatagtagtccgatttgggaattattgttactattgggcaatatttattagatgaaacttctgtcgacataatctatatctgacatatctagtaattgctaacatttatcgacttttatttggtacttgtctagactaaagcactcactgttgtctcttttttattcatttctttacgatatctattttgaattttttatttcgaggtttggttctcagtttagatccacaacatggacatctaaaaccatctttccattcgaagaagatttgacaaatttggcatcatctatgatttgataaatatcacttggattttgttcattgttcgaaggagtttaagtaggttcattcaattctctatgtctttttttgtttcggatgtgtttgaaataatcataaaaaaccacggctaaggcgaggggagtagaatttatgtcgataaaggttctttattagagattctactattattatagcagggagtgatatgaatatttttttggttcattgttaaagcagaatcattgattttatgggtttagtggaaagagtcacagatctgggagtaattcactatttattatatgctttctacaaattcaatagttcagtaaaattgatcacaattgcagatatgatatctcaacatttttacacatcaactttttttaaaatttataaatcgtttttaatttgtttatttaatctaaaaattgatagaatttaaaatcaaaatttttaactacttgaaataacctatcccaaataccttcaaataattaaggaatcctaacagtagtgattttaaaatgtttaagatcgttcttgtaagctctcatcatcgttggttgtgtctgtggagtttttatcatcgtcgttaatattctctatagtttggtcaaagtctctacttaatgaactaaaagtactgctatcgttttgttccgtcacttcaaaagacggatttggggaagccatggaatttggaataaaagtaaaaggtaaagtaaaatagatataaaatccaagaactaatgccgatgtaattatagagaaaagtctaatattcataatatattataatatgtttattaaataataaagttacgggaattgaaaatttgaaaatttcaacattcagtaggatagatgatactttgccgccttcttttttctaaatagaaaaccaattatattcaataagattagagattgttctgtgcaaaatgtgattactgtttaggtaacaggtatttttaatcatggcggttattacaacttattataaggttgaattccaaaatcaatatggaatgggccattgtaattcctagtcatggttacatagatccattctgcatacattaggtatgaaaataacttaagtagtctttgtgatatgatatagatagtatgacagttgccaattctaaggaattccataattgtagtggcgaaggtttaagcaaatactatgaaatacatgttgatactgcaaaacgtgttgtccgtgagggaaaatatgaaactttgtataccgatacgatgagtgaaattatttgtttagttaatagtttgagtggagattagaaagatggatgaacttaaaagaaaaattctctcaagtttttaccatattccagaaaaaccttaagaccacaaagcatatgcatccaaataaaagagttaccataagatgcatccaatgatttctggtcttcatttttccaacctgattctcttatctttattagtgtagattcagtattcaacggctcaaatcttatttccgcaagatttttagtaacttcattgttgtcccattccaatacaatcatctcatttattattacttgtttaacataaacaggaaatgctccaggaaaatcatgaaagtcccatgtgaccgtagttccttcatccaaagggccacttgctccaccagttgtaaagtatccacttagtttttttggattatagaccgcatcaaacacctctgctactggttttttttctttgaataaacttcaaatgctagtttcatgaatggttaatatttgatatgttatataaatataacatattgagggataaaagagatgatttaactctgaaagctttgggaaatcctcaaagacgtgaaatactcgatatgcttagaaataaacccaaaacaactggagagatgtgtgatcatttcaaacatttagatcggtgcacggtaatgctacatttacgtgtccttgagaaggctgacttaataattgtaaaacgcaatggtcgcaatcgctggaactatcttaatccactccctatcaaagatctatatgatagatggatatgtaattattctgtaggggcaattgatttgttaagcaagatcaaaaaagaagtttaaggagagcctagaggtagagaaaaggaatgaacctactgtcaatgtcatagtaatagggttatcaaggtatttcctcttatgtatcccatccaaacgaaattgctgatttcattctagatgtaacaaaaggaacctgtgatagtaatactgtaactattaatccatagaccgaaagatctaagaaactctgtctatgataaattactacttttataaactgggttaatctagtttacgaaaattgtcaggtaagaaagaagtaattcgcaaaaggggtaacatattgggtcatttaataagaatctaatccttttctgagtagataaataaaattatagtttatgctaagtgttatcattataactataaggaaattattgaagatacactatatcatcttcgtaaggacataccttaatgatatcatattcaggtgtatagccacatttgggatattccttctgttttataatcggttgttgactccaatctatcagttcgctacaaactccacatctctttggtatcttatcatctgtataagaaaaatgtaaaaagcatttaccacattacttgaggtttatcgcaggtggaaccatgttatacaaaatcccgatgccaactctagccaagttttgaagcgcattggtaacttgactcgtaacttcacttcacctgcatctttcgttgtatcctaacctatatcttttccatctaagggtctaaaaccaatagacagatggtaacggtacatacctaaatatagatttattttgctacctttatttgattatttatacagacatctttaaggaagggcgtacattattaccttcataatatgacgcctaaagatatacatcttagtcaagtaaatcaagatatagaaccaaaaacaccaaatggttgagaagaatgtctacagatgggttctggatgggtacatttgcgtttgtgtttaacatgtggccatgtaggttgttgtgattcttctcctaataagcatgcaacaaaacatttcaaatctaccgaacaccctatcataagatcctttcaaccaggagcagattggaaatattgctacatcgatgatgtgatgatagagtgatgtctatggaatatcttgtcgatatggttaccatagtaccacaaggtactagttcactcaaagttgatgaattacgtgcggctgaagcagtgcgagctgcagagctctccaaaaagggccatttgattcgcctttggcgtcctccgcttggtcctgatgaatggcatagtatcgggctgttttgggcagaagatgaaatagaaattcacaaactcctcgagtcccttccccttcatatctggatgaaagttgccataactcccttaactccacatcctaatgatccgcaatatcgttccagtcaagccaaggatcattcatagacataagagtttggactttgtacctgtactcacaagactattgataataaggaagagtttttgatcttaaaattttcttttcaatttgcgattccattctcatatgttggttgtaaatagtctgttctaatcaagtctgtcaaagatgcatttaccattttcaaggctagttcgattttttggattatatatcttgtctattcgtaagcatcattcatatccacaacctttcctttttcatcaattgccatcgtacctgataaatgcaagtatgacgaataatgggccatttaagacattttgatatttcatagattttaatatatttatttctcctacagaagatactcccaaactaaatcaaaatccgcaagcacgtgtaccaatactatatctaataaataagaagccactctaatcctgtgtattctacctggaaagccacccggttaagtaaaataaggggaaaaaagcatatgtatactctaactatgaaaaacgttgtagccctaatcggaagcgccacgacgtcatcggccaatcataaattgctagagtacatccggtcagaagctagagatactttccatataacgttttacgatcggctgaaaacattgccgcatttcgatccggagctatctctggaacatgcaccgtcagaaattacggagatgtgcaatcttattcaggatgcggatggagtaataatcagtaccccggagtacgtgttcagcataccctcggggttaaagaacgccattgaatggtgcgtggccactacagttttttccggaaagcccttaggaatcatcaccgcttccacaagcgggattaaaggtcatgaagaattgcagttgatcatgcgtacccttatggcaacctttacacccgaaaccactttactgatccaaggtgttaaggaaaaaattgatgcacacggggctattatcgatatccagaccagggaaagtctaaagcgcttcacaaaagccttatttgccttaattggtacctgatcacattaaaatagtaaaattagccgacgtctggctattgccacccttttacaatatgtatgtgtatccctcttacacaaaaagcaatattatgatttttaaacaccaccgcgcatgtcttcaataactctgcacaccgatttttgaattaggggtgacaatacttgtcttgagtttcattatatgatggatgcactggtaacgatctgtgataatcccaatgagctgaaataaggctacgatcatgctgtaactttaccatcagttggaagcaaaaacatgagaggtctaaggcattatacgtaataggatcccaaattactaccgtcaaaagaaacaaaacctttattgagaccttattgcttttcaattagaatatctttgaatgaccactccattagacaagaaatttgatttctaacagcgcatagaaaatctaagtcatggaagttctctaaaaggattacatggggacgtactatagattaagaattccgtgggcttcgaatccatgaggtatatgggatctgttacttttatttattgtttgaatttgatgatttggttgaatgagaatatgatttgtgatgaggggggcagttggggatcgattctatcgccatgatgggttttaacacgaatgtgaattaattatagggttagtttcataataataaattaggtggtaaaggattaaagtaatttattggttgttagtcatttataagcatgtgagagagatcaattctatatcgaaaaaagggacattggctttactaatgcaaaaatatagttatctttgtgtcctatttctggagaacacatttctatgagatgtcgtacagtatccacaaaaatctacaataccgggtttgccatgacacatacattcacaattacttcctaatgaaaatctttgtctcacaaccctatgtaccatccatgccttataatattatgtaatgatttggctttagtatatttgttatatcaggctgggtcataattcccaacaaataaagcaagtcttatagagtatcatattatgatgaataacaaatactatggtttcaagacctcttctaccacctgggatcataattgtacaaaatatcattcatgttaatattgttaacattttataagatgatcatttttgattcgacaataaaaaaaccttagtaaatagagattttctaaaaattgcaataattattctaaattgaaataacttttgcgtttattttagaaaataatcaagattgcgttaattactttccataacttttagtctcttaaagtttgtaagaagaagaaataaatctctatttctttagtattataagtcaaaatatagatattaaatgcacagcggacttcaaatccctaccgtccatggaaaatataccgaaataaactacttgtatgtcatgtttaatttttgtattaatttaggcatacaggatgacatacaaaaatcaaggaatcaaaagaatcagaacattattttaattttctgaatatattaaattagtctttatttattattagatcgaaaggaaaaagagaggttagttatcaaactcataaaagaagggaagacgactagagtcattgcgagagagatccgaatttctttacaagttattggaaaaataattaggaagtatacaggaggtattaatgaagaacagtttgaagcaaggaaactaactctagaatccaccataattctatctcaagaatcagcaccatttgaattcatgatagatgaaatgatatgagtgatatggatgtgataacaagtgataagatcattgctagcgatagttaaaagaatctatattactcaaattttcatttaatgattccattatttatataacataatgctaagctaaatttactcatgtacgaactatattaccagtaatagataataaaactttaataggctcaaaagaatctttcaagaagatagggctataccatatcgcttgtaacatgtactgttctatcgatttacaaaaacagtatacaaaccaaataagtccaaatcaatattattttgcaaatcaaacgggcccagtgggcttcaggacgatatcagttctttactgtggattctatttcacaaattaagtgggtcaatattgttaagattgaagatgatttttgtgattctacaattccttgaaaacaaattgaagtcgtataataccaatttaccatcaattatcacgaataattcgaattaaaaatttaagttcagagaatcaagatcactatgttcctttcaacaaacactttattttggaccctcattaattaagtatcttttctcttcatgatgcataaatactggttttttcatttataatttttacattttcctaattttatcaatcaaatcaagtacatcgcattcgacttctgttgttatatatatcaaatgatcattgtccaatggcattgtaattctttttatcttctcgtattcggccaatacgtactttccattacctatttttggtgccaatttacttctcatcttccatgcgtcaatcgctaactgaagagactcctgactttcttcccttgttaacaaattggtagctccgggttgatgttctgaaaatactatgccttcatttctggtatcaaatattgttacaaatcgtattgatgaatctcggttcaagatacttcttcccatatttccgtattttccgaacaccataccattaataacaaagtacattgttataaatattcgattaacatgttacaactggttaccatgataccaattgtattattttgtggagtttagatatttgtgaaccacgactaccgcatggttgaatatatcttttgaaatttcaacatctgaaacaatgagtagaagtactttctggcttaaagcgaatagaattgtattaatccagagcaggtaaatgtatgttacaaatatctgatgagttgaaacttgaatcgactctgtacaacttacatgggctgggaaaattaacacagatattaagagaaagaaagtctagtgaccatagtcagacaaaggcttcagatcgaaagaccataatcacaatagccgatgcggaagtgttagagaatcttgataaaaagataaagggtttaatgataagaatctcatttagagacaatggacctggctggcttcaggacgatatcggtcctttaacgtagattctaatagtcagatagattcagatagatttagatgtaaagcttatgattttatcaccatctaaagtagaatatttcatttcttttgactattgttttatatgtaaatattcaaatttactaaagaaagtcaaaagatagtcaaaactttcttggatcactcgctcatcttcatcgtcatatttcttttcacatttattaaacatcctgaggaaatacgacttaaatttaaataatatctatctgaaaaaaaataatggacttgcttacgaaaattgtaacgctgatcaaagggaaggagtatgaaatgttaataaaaaggactggtgataaaatcactttgaatgggacaaagatagggtttgcagatttaaatatggatttggctaacttctcaaataaatttatcgaatttgtgaaagcaaatgaagttgcaacaacccttgataattgtcagtattacctaagtaaaacaattttaaatataaaagataatgataattttaagcaagaatgtcaacgaattagactgatgatcatcgtggcatttcatcaactaggtcaaataataggaacaacgaaaatgacttcggatgagagtctaaaagaacagttgacggagtggataagatatatgaatgacctgattaaacacactatttcgatactagaaccaggaccaaagttagtcactaaaggaccggtctatgatcaaattatgaagtatcaaggtctaagtgaaaaagaaatgcaagaggcaatagacaatttatgaattatgattatttgttaattctccgatataatattaatcttaataagaatatttatcggagacagaactaccggtatcggtactgaaaaaggaataacgctctagttaacgcttttcagtctgcttagtttatcgattaggttaagtagtgaaaatatcatggaatgggaggttagacctctaatacaactttgtatgatgcatttgttatacaatgtctacgtcaggaggggtagtcttcacgactactcttttctcaaagccctctccttttattagcttgtctatggtttctgaggtataatctgcccacttattgtatatactatgtatatcatccttacgttctactgttactattcttttcaaatcaaatttcctttaatgagatcatcgtgtgttctttgtttatcggcacgttttttactttcaatattagtatttaataggtcttcaccatacaagatctcgaaaagtatagtaagaagttttattattttgttcgaaaatttattggaaagagacaagctagatttattaattgtagattataattctcagatatgattccaaataggaggctttctcagaaattattggttacaacctttttgctaatagtagcagtatcagtaatactatcatttagtggaataagcattaatttaactaataacattaatgctcaagcacaagcacaagagcagcaagaaggggagcagacacaggttagcaaattgtgggaaacacctgccaatctgaaggatccagaatccgtagcttacggatccaagcaacatgtcttgtttgtttcaaatatgaatggacaaccagatcaaaaagatcaaaatggattcatttccaaggtttcaccttctaatgggagcataattgaattaaattggataacagcactgaatgcaccaaaaggtatagctatttcaaatgataatagtacattatatgttacagatatcacagacctaatacagatagatattgatagtggaaaaattatcaaacgtttcaatgcaccaggaagctcttttcttaatgatgttgtagcagacaatcaaggaaatatctatgtatcagataccgataccaatactatctacaagctagatacgaatcctggcaatagtacatcatcatctgatatacaagcttggttgcaaaacccacaattaaacggtcctaatggtttgcatatagacaataacaaaaataaattaattgttgtttcttttggacctttaagtaaacccggcggaggcattgaggatatagatatgaaaaataagacaataactagtttaggagaacaaggaactacatctccttttggtggtctcgatggaatagaatccgatgctagcaatacacattactatgttactgacaaccccgaaggaaaggtatatgctgttaacgcaaacggaacaggttatcaaacgttaatagacttgtacacccaaggggcggcggatctgggatttataccaggccaaagtactattataatacctcttatgcaagataacaaacttgtggcttacaagttattagaatagaaatctatgagttgtcgcgaattatcagatccgtatgaccggtcctatgaatatattccattggaagttctctaaaagaaatagataggaacgtacgttgcaacaagaatacagtagactacaaatccattagaatataattctttgatttagaatcaagagaatcaagggcttttaagttttttgacattacctaaagttgtattaattctcacccgacaagaaagaacaactagtcataaagctgaccagagaaggaaatacaactcggcagattgctcaagccgcacacgtatcattgttagacattggaaaaatagttagaagacataccggagaagaaacagagtatcagaataaatctccatcaataactctaaagcttttcaaatgttcaaagagaacaaaagccgagtggaagtttcgattgccatgaatctggatgccgctgttaatgttttgaatctacagtttgatttcgtcgtaattgtataggaatttaccaaacaagagatgaattttactgattattggtaaataatactccttcatctaagttgataaatggttcttcaggatggctaccctttttatttgtgaattgttggcaactctcagccgtattaaatccagcatcttgcgattgtggagcaaatgtggcacacacagaatatggagcaccatctttaaacaaacctgctggagtcttaattggatttaaatcataaatattaattccgtcatcttcaaaagattgcatgtttgtagaagataaatcagtagtaggaatgatacagaatgcttgaggatcatcaactgaatcaagcgtaacagttccttcatatacacaataactaaatgtcccttctaaattctgactccattgaaccgtaggagtaatctccaatccatcccccgactgcgactggatagggccaattgaaagaggaagtaaatacaatatgaattgaatagataaaacagatagtataatcactgaaatgctgatattcatgaaaggcttcattaagatattttttcaacattgtttttatagtagtaatagtgtgctaataagaatcgggccaaatgatatgttcacatttcttgttttcatcaatttatagccaaggaagttagaataattaaaaatgttgtaaaaaaaccggcatcgccagttattagagatcagcttgtctctacttcgtcatctaataccttgtcacagtgagcacataccttagtagcaactccacctgaagggttgactaccctctttacttctttatgttcacattccattgttgttctttctccagtaagaatttataaaaactatcattattttatcctcatcagacatattattaaaattttgtatgatttatggaaacagacaaggagaaattaaagatgaatgtcctaactacctttgattgtgaatatcatacattatttggatttagatcagctaaggtcccaaatactgactaaagaatccgttactgtcgatcgtttaaaagttataacgtcgcgttagaggcgacgtggatagttataaccaaaccaaactaactaagttaattgggcaactttgtctaaattctcgataacaatcatgatgttgtcatcacaataatatggttaccagggatactacaatgatgacacattgtatgtacagattaaaagcgaatttaataatttatccaatcatttgtgtagatataccacgtgtatattaataaacagacagacgggattgagcttttcatcttaaaatagatacaatagcgccgcccctttagggcggcgtagaacagcattaagacaataaccttggcaacaagattgataaataaatggacgtttcaataagaagcctgctctatgcacaaaaaaattaagcatcaagttgcaataataatcggtggaggaattgcaggtttgttagccgcaaggacattatgcggacattttaaagaagtaataatcatagagaaagatcagtatccaacccaagatggtcctagaaacggcactcctcaatctaaccacattcatgtattgttgatcaaaggtaaggaaatacttttgagattgtttccagatttagagagaaatttggttgccaaaggggctcatattgtaaacctcacaaatgatgtcgattattatgttggaacgggttattcaataaaatttgaatccaatttaaccacaattgcttgtacaagacaacttttagaacatgagatcagaaatgaaatcttggaatttcccaatgtgaatgtgcgcgaaaatacccgggcaacaggattggtcgttgcaaaagacgagaaaactgaacagagtatatgcaaaggggttacggtgatctctactaatactaattccgaggaaaccattataggagacctagttgtggatactagcggaagagagtctaagaccgcagaatggcttgaccaacttggttatggcaaaccaaaggaaacggttgttaattcgtatataggttattctacttgccggtttaaaccacatacggcccaaatatcgcagcaaccggctgctggtgctgctgctgataatgataatgacaaacctataatcaaacctattatcatattgacaaagccgcccttgaatccaagaatggggattatttatcctgttgaaggttcatcgtggttaatcggggtactagggataggaaaaaattacccaccaacagacaaacaaggattcctgcaatatgccaagaaattggaaacacttgacatctacaacgctataaaggactttgagttaagtggtccaatatacggatatcgaactccgggaagccggcaatatcattatgaaaaaatgaaaacttggcctgaaaattttgttacctacggtgattccgtttcttcattcaatcctttttatggccaaggaattactgtggcatgcattgaagctgtcactttagacaaagtcttaagaaaacacaagaaaaaaaatagcgacctcctgggattttctacgacttttcagaaaaaggtttcaaaaattaacactcttccatggctattggggacaagtgaagactttagatggccttcaactgaaggaattagaccacacatctttacacggtatttgcaaaaatattctcatcgtgtgttacttttaactccaaagagcaaaattgccgcgaaatctttttttgaggttatgcatatgatgaggtctcctctaatcctttttcacccattaatttcacttcatatcttgattgatatcttaaaaaagactgccaaacaaagtaagacttaatctagcggtaaccgctcagcatttaataattaatatcaactgattattgtccaaaacaattgatggtattgacaatctggcgcgtcctttaagggcggctcggaacgatgagcttgagaaagaagggtaacccaaatcgaacataattgcaaaaaaatatcaaaatactacgcaggcaaacattctattaaggattctttgtccatctttatctcttttcttatagtctctagaactttaagagcataagcgactatttaataagataagtattttcccagatgggctttgcataatcctgagttatgcaagttaggtaacagaatttgggttactcaaatcctcttttgaaaccttacctgagaaaagaggttatcaagtttcggattttaagatatagtcttcgcttaacttgaaaatacttttatattgaaaaaaacacaaaattcaaaatggttatgtcaaattaatagtaattatttccaaaggattcataaattgaggttaaattgtttttaaaccatctactacgtattgaactgcaattgctgcaaccagaactgcaaatattctagtaatgattaatgaaccacgtctacccagtatcctgtatatcgttcccgttagaaagaacacaacataagttatgcatatcacaattgcgattgatagtactgttaccatcaaccccgacatttgaaaagataatatcacagtagtaatagcacctgggccggccaacaaaggaaatgctaatggaactacacctgattcgtcagaaacagttcctccaaatctccaaccaccatgagttaacaattctattgaaaccacaaaaagcaatatccctccagcaatcataaagctagatattgtaatcccaaagatcgatagaatttgcgtccctgcaactgcaaagatcattagtaaagcgcctgccgtaacaacggttgtttttaatactctatctcgttcgtttttttgcattttttgagtaatactggcaaataagggtatagtaccgattgggttgattacggcaaaaagggatatcgtggcccttaaaagatcatctccaaaaatattcagaaatgaaaataaattatgtggggaaatagtagctatctcaaacatagtcacctatattggaattctatttgttattaagattcgtcgggaaaacaaaattatgattatgataagttcacctaaaataagatattgctttgcctgtcatttataaaatctaaaaaataaagtaaattagaacttctttaagactagttaacatttatccttattgtattttacatatgccttaatttaataacttcaggctcaaacgataaatacccgaacctcaaccggtgggcttcaaatccatgaggtacatcagaactgttgattaaataatcttatctttatgtctgacatataatacgttcattgtattctaatgttttctccttaatgtcttgaataagaaatacgcatctacaataattttagatttgccaacaatgaaggagcatttgtaaataaagattctcgtaacaattcaaaaatgtcaatgtgatgaacaatataatatacaaaattataattaaatatcttttagaaatccaatttttttaataaatataatgtaaattacgcccgcgagatcataatacaaaagacataaacacgggatctagtagtttagattacaaataaaatgtctttaagaaaagaccatagatggaaatcaaggaaaacaatttcttttatagtctcaatcttactaatagctggtactactactaatatcttttttattactaataacggtaatattgcattagcccaaccccagtctcaatctatttcaccagacacatcatcatctaaacctattatagagaatgacaatatgacagatggcatttctcattcagtgaatcagacccaaaaagaattacaacaacaaccttcaccgccaaaaatccacgagtataccctaattgcagaaaatactaccttagaaatagcgccgggactccgtgtggatgcatggacttacaatggcactattccgggccctactttaacagctacagagggagatagagtaatagttcattttattaataagacgccattaccacatacagttcatttacatggagaccatcctagtgaacaagatggtgtttttgaaataataggaacaaatggaacatacacttatgattttattgcgcaaccggctggtgccctagcataccactgccatgttcctccagtaatgcaacatgtgagaatgggtttgtatggtgcattcatagtttacccaaaggatccattaccacctgctagagaatatgtttttgttgcaggagaatatgatactcaaaatcaacttattccgttacccgagtactacttttacaatggttatgcagaacaatatgaattgaatcctcttccagcaatgactaatgagacagtacgaatttaccttgctaatatgggaatgtctccagcctatggtatgcatattcacggaactctgtttaaagcatggccttcaggtattctagaaaattcacccctaaaggttcaatcttgggaattagcctcaggaaatacagccattttagaagcaaaatggccgtggcctggtaaattcacatttcatttccatggaataccggaagagcgcggagcgatgggatactttaatgtgactgaccctcctgccaacgctattgatggaaagagcatagctattactaaatcggtaaacatgaatgactggcagatgaacttgacaaagaccttacaaaaagctgatccaaatggaaatataacttctacagaaatggtcgagtcatctcctcccagtatgcatggcaataatcataatgaaacgaaagaaaaagaaatgaaaaaacctaccacgcaggaacgggaacaagaatcatctttatctaacatatcttcatccaatgataacaattcaatccaagtttcaatagtaaaaggggcaactacccttggcgataaatcatatgtaccaaatccaattacaatcaacgtaggagacacaataacatggactaataacgataatactatacacacagttacatctggaataccaaacactccaactgtaggtcaaatatttgactctgggttaacatctcttatttcaccatctaaaactttttcacacaaattcattaatgcaggtgaattttcgtacttttgtagattgcatccaatgatggtaggaacaataaatgttattccttagtcttttaaaatataatgaatataggatgaagtcttacccaactagaagatgggcccgattaatctaacaattacagatttacgtgacatagacctctgaatattatggcagaacaaatgagtgggacgcgtatgaaatttcatactagttttagaataagtttaaaaaaatttaagggaattattcaaaaatattttgaattaatagcccaaaatgaatcctctttgttttcgtttttgttaactaatcactttaattgtgaacagaaaataaattcagatcattaataattcaaatgcagattttgttttgaggatcgaagaaagattctgatctacatgctgtttatttccggatttacctcatattcaattccatttacatatacatctaagtcataacaagatcattttacatattttcacatcatctaattactgcttgcttttagatcattattagcaaatttctgtttacaggaagtaccatccaggacaccattcttacattcttttgttttcatgttattgcagtcgttatcagatccattacacacgcatttttttaaaatggcagaacaagtatatccagatgctgtcgtcaatggaactatatttaacagactaccaaccaagaaagcggatataaaaaagcctacaaggattgcaatggttgttttttggtttgttgtttttttcttgaataatttttttattcatatctttcctgtatcaataaaatatatgagatttgctaacaaactgcaatactctaatattctaatatctttaggagcaaaacatgaagcttttaaatggttatagaccttgtcgacattatgttaataaaatgtatgtagtttggaaaatgtattaaatgaatctttttaatgacaaatttgttagtattaaacaaagatggtgaagcaaactattatggaaaagtaatgacaacatcagaagcaaacacatactataatttgttactaaaaaatataaattggaagaacgatgaggcattatatcacggaagacacatagttacaaagagaaaagttgcttggtatggtgatcaaggttttctttacacttattctaatactacaaagcaagcactaccttggaccaatgagttaatagatctcaaaagaaaaacagaattaatcacaaattcgcagttaaactcctgtttacttaatctatatcatgatggtaataaaggaatgacctggcatagcgatgatgaaaaatccctgggaaaaaataccgtcgtagcctctttaagttttggcgcggaaagaaagttttcatttaagcataggcgcacaagacaaacaatctcactactattagagaatggaagcttgcttgtgatgagaggtaatacacaatcaaattggttacattccttacccctctcgagcaaaataaatcatccaagaataaatttgacttttagaacaattatagacgagtcaatccatgacacatagttgacttagataacatactaatttagttattaataagattgatttttaggtaaatcaataatagtcatcaaatgggatctgtcaaatggaaaagattctatttggagttcacttgccagttatggggtttgataacactaaccatgagaaaaaaggaatagacgaatcgcctaatacacgagaacagatgttgtctattataaaaaaagccgaatttcttggatatgattcattaagtgtaaatgatcacatcgtttttagaactagctggttaggttcattaagtgtattgtctgcagctgctgcagtaaccaacaagataaaacttggtacttcaatactgaatatagttgtaagaactcctgtaatttgtgccaatgctttatcagccatagacatactatcatcaggacgcttatttgcagcaggagtcggacctggttcacataaaggggactatgacgtatgtggaattccttttgaacagagatggagtagatttaaagaggcattagaaattttgtataaactttgggattatacacaagcagaacaaaatagtttattagataaagtagattataatggtaaacattatcaactagaacaagtatcttttgcacctaaaccatatcaaagacctcatcctcctattttcataggaacttggggatcatcagaagaaggtctaaaaagagtagcaaaatatggtgatggttggatggcatctgcctataatattacaccagataagttcaaagaaaaatgggatatacttttatcgtatagaaaaagattaggtaaagatactgactcatttgaaaattccatgatgtcgatgtttggatatattgataatgaaaaatacaaagttagaaaagtggtaaaagatattctatctccagcattaggaagacctgtagaacagttagaagattcacttctttttggctctgtcgaagaatgcacccaaaagataaatgctttttatgaagccggtgtaaaacgaatacatttttggcccataaatgattttgaagaacagattgaaatttttaaaaaagacatagcttgtaactattagataaaaagaaaagacacagattaacagaaggtccaaagataacatatagttcactactcataaagtatgagatatggctagtgcatttactatgttaatcccatgttatttcttctatttattcaataaagaatattatctcgtatttcttgtagtaattaaatgaatgattgttcaaacgatactcgaattaataaggtaaatacacaaatgctgaaaaccatgtatgagtctcttcagaataatccttctgcaatgacaacaacaacgttttatgtaaaatcgaattggaatggtggtttaggtgttacatccagttccaaaaattttagccttggtggtagaactatggaaaggaatgcagaatataaaatggattacgattttcccattcaattttcaggtgaaggaagcggtcccactttttgtgaggtccgtatgggtagcttagctgcatgtttaatacaaactatagtagttcatgctacatcaaggggtatccttattgatagcattaacgttgatgtagaaggcgatgttaatttgcgtggttttacaggcatagattcgtgttagatccggggcccagcagtttagagtaaatctcaaaatcaatagtaatactgcatcaaaggagcaaataaatgaactatatgaaattggaaaaaagttttcccctgcgtttgacaccttaactaacgaaacttcagttgttatggttggctctgaatgacttgatatccaaactctaaaataaccaatttaaacatattgaagtgtccgcatattaatggttacattctctagatagtatctcatatatctcatatatctcatataacgttagtatcctaaatataatgggacattagaaatgaagttatttgcagaatcatttacccaattgcataccatttttcttgttagaaacattgatactgtttatgtctataataatataggtcaaaaagcttcaaaagcattaaaaaattagaaaaggtattcttgaaaatagaggttttacaattagaccatcatcgtttctagccatcgaattttctgcgttaaaaatccctacattctttatactgtcgttgtctggagacaacatttttactgtcacataaggggatagtcactggcgaataatttcggctctgcccttctaacttatatgcaaaatttgatctggctcagcacatcaagattgcatcacggaacgcaatatgtttattaacaaaatcaaattctctttgcgtttgttttgctagtttcacaaaacggcaaatatgtatcatcattattttcctgttcattctcccttttctcttctattcctgcacgttcttttttatattgtaattttatttccaaccaatattttatcactctttaattattgagtcctaataaagtagtaaatttacaacgggcctggtgggtttagtaatagatatattacgagtctgaatttcaggtttgaaaaagatatgaactcgttgttatatatcgatctgagaccatatttactgtaattcatatctacgatttcaaaagattaattattaagggcaggtcagagaagaatcaagatcaataaaactgtttttgataattaaacaagagatctgtcctttaataaaacaaaagcaataaatcaatttaggtataacacccttagatatactcattcatcatcaaaaataatgatatttaaaagatgataacaaaaaacccaagaatgtttattttgcccctgctattaaataataaatatcaataagatgaattatcataaatatactatcgtacaaaaaattagcaatttaacaatttccgcattattcataatcttatttgcaatatctcttcccgttgtttatgcacagctgcaacaggggccagtaggatcagtcccaccattacctgatagaataaacctatctatatcgaacataacagttatcgaaagccctacgggcttgactggtatagatgggattattttaaacaattcaactgaaaacgtaaaagatgtcaaagtagatattatcttatttgatccactaaacaaaacaatagaggatacaaccaggtccattacatctccactttctacaatggaaccaggctctacagaaggttttagtttccttatgagtacgaaggatattgatcattatgatgcacgttcctacggcctaagaacagaataaaagactcgatctgaagtattttgaagatcgaacaataggtttattacagacttcgggacgatatcaatccctttagatgggttctattagtttaatgaattaaatttatagtgatattaaacggacaaaccaataggcaaatactactctagaagtttatccgttagtaacgtatatcgtacgggtggaaatcatgcggataaaactaccactgagccacacaaagtaaaaaaatggtgtcgcaattatgaaagagatctactgaataaatagttgtattgtctttatttatttaagttccatatgtcatctcacacaacttccggtcatttcaaacgaatatgcaatgagataatgaacctaaacaagtcgattagatttgtaggagtagtgaacaatttgggtacgttgttggtcacatcgtacatagagaagttaataccactcatgacaagtgaagagaccgaaaattatgcaatgcagacggtcctgagagctgcaacaagagaagactttgtaaacaaactgggtaagtttaaacactctatcggaacatatgatgggctgatacgccacagttccagttataatggaggaaaatcttcaagctcagactaaattctatctcctagtatcatttgacattgatgccaacgttaaagatattatagaaaatgaattgttaccctatatcgataaaaatttagaactattcaattgacaagaatgaatgttattaacatattgtactaagtcgttagtggccctgattggctctgttcagttaacgataagactatactttgaagacatcttattccatttatgaataccggaaatagaacccctcaaaaatacattaattatggtatgtatttgtacttttcaggtttgtctttttgaggagagcatctgaaagactgtcctgtcttataaaacgtatcaagttctattagccaaaaaatggaactggattcaaaagtacaggcctcaactgatcatcaagggaaaacgattagagattactcgaagtatggttaatcctcttcctcgccaggataattcttgcatctcaccttacggtgcggttatagtaactattagtggacgtgaaacgcattcccctgcgacaatttgtaacaatgaccatcttgtatatgataatattttatagcgtttaggtaaaccctttcaaatgagagtaattacacaggatgtttcaagcgacttattggctatcgatccctgcattaaggatcaaaatggtggatggtgattgcgttggaacatctagatgcaatggtataatgaagtctgaggatgatgcttctattaccctccaattcagattccttaatcatcgaaaattatttttcgtagtgttgttttgtcaaaatggttctctttattgtgcatgagaaagtagtttgaccacctatatcagatatgatctcagtttttcacgctcattggttacatttcaaattatactactttaaagagagggttcaaataaagtgattggacctttaatgtttgtaaaatgaatacacaaaaagtctagtaattttctcaaattacaagagtattagagtattagaattagttagcaatttcaatatgattatttgtaatagagaccggtatgagaatatcaaatctcaaaaataaaaacaaacaccgtaaagcaatctccatctcggtgacaacgatcatagtattagcaataatggttagtatgactatcactcccgatgatgctaaagcaacgatcgaaacctgccctgataactggacatttttacttgatgggttaaatcctgattactttgattgtagaaatgacactgaaacatcgcaatttccagttgatgatgccgccccttcaacttcaaaattacactcaaaatatctactaaattaaacgtgattttatatagaatggttgaaaccttgaataacgaatagcacaggtgagattttcttacttctgtttactgtcctaataaagtagtaaaattacaccgggcccggtgggtttagtaatagatatattatgagtgcaaattcttcaaaaaagctattaatcttcagaataataaaataatatgaattcaatggcttcgaatccatggggcatatggcaagtgtaatataataaaaattaggttgagataattagaataatttggtcctattgcgattagtattacatcctgttactttgaaaatggttttaaaattttaacacttaggtgaatgaaataaatcgtgactaaaactatgttaataactcattaaaacatctttgtcgaattgaatgaacacgatttatcatttaaagttagtcttgtacaaaacaaaaaaattagtatttgaaaatgaaagtttgcactgaattgggttccacttgtatgttattcaatactttgtatgtgctgtcgggaaaatcggctactattacatattttcctggattcaaattttgaaacacatactttccttcttgtgttaattctacacttgttgttttagagaggccatcttgtcctgcggctatcacaatcgttccaagagctggtaatcctgttgatgtaaatgcatatccgttcacagctccaagaccattgtcatatactggtaaaggatcaaagatagaccccatggttgcattaggcgatgaaatattttccaggagatacccgataactagaatagttgatatcattgttacgcctatggttattgttttcctgtgtattctaagtaaatttagtatacttgaccgctttgtttgttgtatttcattgcttttgtgtttgattgttattaattgcatttatcttacaataacatattggtaatcgttttatttaagcctttgtgatagctttacaaaatcggaataactcattcattaatttcaaataattatatgatgtggtaaaaattttataaatttttatatattctgctattgaaggtaataagaataacagtagtagaattcatttgaatttttgatagttaaattgtgtgaagaattacagcggggaatgtgggcttcgaatccatgaggtatatgggatctgttattttatttattatttttgcaaaaatctgattcctgttatgaagttaattgaacctgtctaaatctattccagttccagaacatggttatttcattgaaaaatagataataaattttataaatttgggtattattacctagaataaacaaaggaatgcaatcaattattctagtattaggcgggatattttggatccttacttatattttcataatttcaaaaggttataaagataaaacctatggtatgccactattagcattatgtgcaaacatcgcttgggaattcatattctcatttttattacctcattctccacctcaattatatattaattacctatggtttgcactagatgtagtaattgtattccagttttttaaatactctaagaatgaattccccactctatcatcactgactttgtgttttgtttttggaatctcggtagctactgctttcattataatattgacgggtggaatctttcttggcgatgttgatggcgtgtatgctgcctttggacaaaatttactgatgtctgtgctattcgtagttatgttctttaaacgtggaaacacattaagagggcaatccatttttatagccatatttaagatgcttggcactggtctaacaagcatacatttttatctattcgaacctgtttctcaaagctcatttatgttatcgttcttgtttgtttcaattttcttctttgatctattctatactgtgctgattgtgaagcaatataagaagaacaacaaatcactatttgctgtgtgaacttgaactaaaagatgaagagatatcaaacggggcccggtggttttcgctgtattttcacatctaaaaaaggactcattaactataatgatacctgcaattagagttttcaggttctctaggatttgactaatatgattagtctgttttattctactgccaattagttaaacaacaggaagttaaaatttacaataaagaaaaagatataattaatttatttaattctcgttttctccactatcggagccttctccactatcggagccttctccactatcggagccttctccactatcggagccttctccactatcggagccttctccagcttgtgatgcagcaatttgtggaggagcaacttgtgattctccaattacaacagtatcattttccattgtcatattcatactgcccgtgttattcattggtgctgtcatgttgtccattgtcatattcatactgcccgtgttattcattggtgctgtcatgttatccattgtcatattcatactgcccgtgttattcattggtgctgtcatgttatccattgtcatattcatactgcccgtgttattcattggtgctgtcatgttatccattgtcatattcatactgcccgtgttattcattggtgctgtcatgttatccattgtcacagtcgtatttccttgggctgaggcaggtgtcactattgatccaaagatcaatgctgttgtgaatgctagtacaatacctaaaattgcgagtaaactggttttattcatgcatgcgaattataattcttctcatatataatatctttgtttagtaatctcatattgatatgaattaatcttaattaacgattttgatttgatttataccgaaacttgatgatttaaagattaaacgatgaggaattacatgaaataataattttttgagattcaggagatggttaatttagactgaagaattaagatctaatagaaaagtcaatggtgggtgttatggaataaggtccaatagattataccgatggtaatagggtggatttagatacgatttaaaaagacagtgcttgcatcatcaagaagatatgtgtaataactattaaatgttgtaaacaaagatgatagtgaagaaaattagagtaattgatgggcactgataccatgctcttttaattcttgccgtgaaccaaatgtttggtcacatttatcgcaagggaatgatgctttgacattagttgaattctcgtctgaatctttcacactatcgacctcataattattcatggcatataatagtctacaaattatttaaggatccaaaatttaaagctactaattgattgttttactagtgccaattttgattattaatatattatacttaatacacagataacttagaattaggtatatactcaagtaacattttcgatgaaaaaaagaggagaaatactttctccaatttgatactggaattaaacaatcacaagacagatcgcatcttatcaatggtttctgaaaactttgaagccgacttagtaggacatagaatttggcatgggaaagacgaatcgagtaaatttttatcggatttgtttcaaggctttgctgatttgtttataactccgattactattttatatgatgatagcaccaataatcttattatctctgaggtcgaagtagaaggtcatcaattgggatggtggaacggaaatccttccagcggtaaaaaattttcaaccatgggggtaatttctataaaatttgataaggtgaacaaaataaaaagaattggagtataccttaactttgcatcgatatacaagcaattggaaatattaaaattttaaattgctttaatgagtaaaagacttttttatacaactaatttattgcgctattactgttccattgattaaatttgttggtcctttgactaactttttctaattatcttaaataatttaaaagacgaattgattcaacttggtctgtgaaattcttagaatatatagttcggtccccctatgaggcaaagtcctttcagatatattttgttttctactattattgtttttacattttctctctttacttttgttaagcataattagtttgatattgcaaatttataacctgaattcacaaggataatttttatggaaataaaatcagaatttattagaattaatagtgttgaattggattattaaatttaattaatgatttctaactctagtaggcagaatcatttattttctaggattagaatttaatatgaatcgcttgtttgatgtatatttactaaaacccacccccggcttcgaatccatgaggtatatgggaactgatactttttttactttccaaattaaatttcaattatcccagaaacaaaatcctcaaaattgcaccataaccagatacgatgaagtaaaccaggttaattataatctataaatagtctttcctatacacatattttactattgaaatctagaaattctttctttgtattaactttgatttttgttgttggatatactctgtcacaatcctattctaattccaatgcacagttagaatcaacaacggccaatcaaaccaaattcacatcctataacaatacagaatttggtatatcatttgattatccttctaattgggaggtttcagaaaaaacaaatagatttgatacggcaactcctgatgtaaaaatcacttctcccgataacttcatgaattcttttagtttcttgaatcattacgaaacatcagatgaatcattagcctcaattggattaaaagaaacagcagaaagttatgcagatgctttcatagctaatcctggatctgttctaatagaagatgtaaatgattctaagtatacaatagatggaaatccaactgccacattcttattcacagatccaggtaatatgtatggctcagataaagacattggtaatcaattctttatggtagaatatgatggtaaactgtatgcaatgggatacaaaaataccgttgacaattttgattctcctcaaagtcaggaaattatggagagaatcatttcctcagttaggttttcctaaatttgatttggttctacaatagcatttaattgaaaaagccttaagaaatattagatctcttgtgtaattagtacaaacagccttatttccgtttatcgtttgtaaggatgtcctttcctcttgttatcctatcacaagttatctcgaaagccaatcctgttcaagtcattcacaggtcgttcggtccaaaagtttaacgatatttataaaataatataatcaaagtatgcaaaatatgagataaaatgcttatctttcctaaaaagagaactagacgcatactcatgcagaagtttcaaacttgttgttaagaataggattatcatggttttagtgtactaccgttctgtacatcacctacaccttgatggaattactctttggtttggaccagagtaatgtatatagagatatccaaaagaatgaagggctgataagacaatgcataccattcctcaaaaactatataatattacaaaaaggttaaaaaccgcggaagaggttgaacagtactttccagactttttggcttttgtggattttacagaataacccctacctagacataagaacaggttaagaagaaggatataccactctgatggaaagaaaaagaaacacaaggtaaagaacctgtacgcagcaatcaagaagggactgataatctacaaatccaagcacaagcaaataggtaggaaataaggataattactacatttacaaaaagaattatcctgatataccaaaagacgtagttggcctgtttgatcttggattcttcggaatagtggaagactgccccgcataaaaatcatcattacccatcaaaaaggagaaagattgtgagttaactacggatgaaaaggagtaccacaggaatcattctaaaaggagggtagttatggaacatgccatttgtaggttgaagaaattcaaaataatgaaagatgtatttagaaacaggttaaaaaggtatgataaagcataagatatcgtttcaggtactggtaaaactacagaattatgaatcctgtttagttatgaagattattgtacctgaaaggaactgtaaattctttctaattaagcaagatctaatattgtctgttgaattcatcttaaagtagcccttatatcaaacgatcttgtcacgaatttaaaatcatgaaatcttcataggtatttggatccttcacagtcttaggatcgattttatttttatcggttatcattttatcttcaggggttattatgggataagcccgacaacaaacctcaaacttttaatatctaaatcaaaatcaatctgtaccttgctcaaccctagtacgaataggagtcctcaggtgatttcaggaaaagaacttgatacaatttgacgtctagtaggactcatatttggcactttaccaaatgtgacgaatagaatggttgcgaagaagaggaagttaatcaactctttcactaattatcatcctttcgcagtgctcatctgtccatacacctaccccctccagtttatgttgccattctgcatctattttatcggagcatgattttgtaagggcgttaaagtacgactcagtcatagcgttactaccatttatatcttgagtaacctgtgtgtaattaacttcacttagtgctgccatcgcgttttcgcgcaagtcgtttatgtactcttgttgtaataagatatcttgctttgtcccaggctggccatgtccccccacgaaaacgtcaaagtccaaagccagtgcttggtcaatcgatctgacaaaggctggcacgtcgggagtaacactaaggtgtttccacgggacgccgccaggcacaacgtggtctactgccatcagaactttttgttcagggagataaacaaatatgttaccctgttggtggtatgggccaggatacaggagttggagaacttggtcgcctattggtaagctcatctccttagcgaaattcatatccggcaccggtctattcgtgtcgtttctctcattcagaattttagtagtttcgttatgagcaattattgtgacattttcaaataagttggcagcacctatgtggtctttgtgggcgtgactgtatatcaggtgagtgataggtctatctgtgacattcgacactgctgcaaatatcttgtcacccatcgctggcggcgcgtcgatcacaacaactccctcctgagtcaccaagaacatagagttgtatccgcttgcagataccacatatacgccgggcttgatttcttgcaactcatagtctggagcctgtgagtatacaaggttagagaaaagagtacaaaaaaggatagcagcggcggctgccaaagaatactgcgctatatttgatttcatgaagaatagtggccaccgttactaataagtatgttgtttatggccttgtcactgtatatgacttcgtagaatcgtctaatcatccatggttccgttttggggtccaataacctgctacgattcatctttatcaagaattagaaaaaatagctatatcttttggtatcatacatttgtaatccctaaagaataatataagaaaggaaaaaggcaaactaagtcagtaacaagatttctgatatatgaacaaaaaggagataaatttattaatttttttatggttgtctgttgacctggtttattactttgatatagagattttaaaaggatatgcttagagggaaataatatatcttctcttatctaatctcttgtatcgcccagaattattagaatccatgtgattaacgggcccggtgggcttcatgacgatatcagtccttgaatatgggttttcttcataacagggcaacaccattctttttgattgatatttagcgtgaacttgattagagccaaacaacaacttccccattaacttgtacagaaaatattaattcaaattgttcaaactatactttacaattagtaattagttcttatttagccaagaagttaaaattaatgtttaattggaactgggagaatatggaaatatcatgaaagaacagcataaatatttctgtttatcggtgattattttgttatcttcttttattttccttggagttttagatttacaatcctcatgggctcaatctgtaattaaaaccatagatgttggtgatggaccacttgacatagaatataatccttttaacaagtatatctatgtagcaaatggattatcagatgatgtacccgtaatagatagcacttctagcaagataattaaatctatagatgtaggagattatccaacagcactacaatataatcctagtagcaagacaatctatgtagcaaatactggttcaggtgatatatctgtgataaatagtgctactaataatgtgcttaaacctatagatgtaggagatttcccattagcactacagtacaatcccagtaacaaatatgtctatgtagcaaattttagttcagatgatgtatctgtaataggttaatgcttatttcattccagttgcgttagttgtcgctctacgttagatcgtcaatgaccacaattcctgaaataacaactattattctcttgacttgcaaaaacaatttccttaaagaatccaaaatacaaatcaaatgggccaggtgggcttcaggtcgatatgtcctctaaggtaggttatattgattattgaccgtatcgactatccatccattcaaactcaaaagaagtttgttattattctaaagtcctctcattgctatttggcaaattcataacactacctttatttggtttgtctggctgttcaaggactccatcatcttgtatgggggctgaaggaccagatggtgaggatggtggaggattaggtggagtatcaagcatctggagttccttatcgttacaaactgtataaccaataccctcttcccattggcatgtttgacaatatctttctccattactttctttccaacaacacgttgtatttttaattggagcgccaggggcaaatatattgcaattcagagtaccaagaaaacccgggtcaggttttaccgcaaatacatagggtgagctagaaattaatcctgacatcaagatagccattatggacgtaatcattaaagtttttgtgactatcattttctattcgtctcctctgtatgatgtaccgaaaatatttgtaaaaaaagttggtttttcgtgtttttggatataattgattatgtacatgaacttccatgacctagaaaagtatttgagaatgtctaactaattctaagaattttagactagcagtaacattaatcaaacttagaatgattagcccagttaaagacaatgggccaggtgggcttcgaatccatgaggtatatgggaactgtaacatatttatgatttttctagatagagactggaaattcgataacttggcatattgtgggactagcatgtgggataaaaaatgatagtttttttcacaagacatcaatgaccttaatccctactagcaggttcatttattcgctttgtatgctgtaaccatgttataggaagatctttctcgtctaacaaccctaattgaaacaaaacagatgcctgatcccaatagatattttaattatatgactcagaaattgatttcattttttcatcaaacttatctggtaaaaattttattttatgttgttaaaattcttgttaatattgttttattcaacaattatttgattattctaattttactagatagtttaaagtaatattttaatatcacaattttcactaaaatataatgaattggaaattagtggcagtatttgccataagctttcttatgatgggagtagttgtagcaactggaatgacactgggctctgcttatgccgacaatcctccaaagtactcaggtccgggagaatcaggcaaggtttcatctaatagctttaagcaatgcgagaagaagagtcctggtaatagtccctgtagataatccacccttcttttttttaatataaaatgaataaagtattatgaagtaaatgtgatgtagttatgctttttattttagatctctggttaaactatttctataaaccatttttgatatttggctattacaatagtaaaagtgatctgtaatgattgctgcagagagtatcattatccatacaatacatctttcaaaatatatagataagtacgacttatttgagctggagagtcctgtaggtctataccaaacctattcaggaatttataattttgaaaccattaccaaaataattgacggttataaacccattagaattctggtttattgcagtggaatgcacgcatctacgattgtaaaaattattgttactatacaaattagaaaatatcgattacgaattcatcgagtggtaatccaggatgaaaaaagtatagtaagaactatgatcttgagattttggtcaccttggtcatctaattttgcataaaaatggaatgcagaccataaactatgtacatcataatgacatgaaaatacttcttactaaatccctaacttatcatatcttatcaccctttttatatcatgatttttttgcaactgcccttagaacatgtattacatcacatcctcatcctagagaaaaacttgagattttaaaatagtttttttggattttcctgacagatctatttagatcaatcataccgaattaatgagagaaaccttgttaaattaatactttaaaattcaatatggcatccttattcaaatgtcattcttgcaatgcaattacagatatatctgaaaaggacagaaggtttgacaataacatctatagttcatgcgggggacaaactcaaaaagaaagaataaagaatgatagaaattcatgaattatttaataatacgaaacagggaggttagagacgttactaaaattggtagctgggtcggtgggttcggtgggttcggtggtatgtgaaacatatttgaccgaatatgcaactcacatttttctaatacgaatcggttgttgtttgcgctgttttttcctttcccttcttttccacaataatcacagattcttaatgtttagaggtttaatattttacagtttttgtttgatttgtaacctacctaggttggataggatttcataataaagttatgaatgagggattatcaactagataaaactacaggaagttaggttatggtttcaaagtatgattaactataagaatattctaccggtggtaactaattaagaatctattttgttgaaatcttattaatatctgtgatgaaggattatcatgcctatagttagcgtacaaatgtatagtgggaaaagtcaaagagaaaaagacagattggcagaaacaattacggaggatgtagttaaaatattaaacgtaagtaaagaagaagttatagtattgtttacagaagcaactcatggaaattggtattcttctggtgtacgtctctaaggaacaacagggaatgctttaacatactgcccacgcactctttgatttaatgtatttcctaaagaaagtatcggtttttgtgattttttatcgaattgctaattgtatatgaataacacggaaatgcataaaataaggcagttagtataaggaatgaatgtatgattaaaggtaataaagaaaaaccaccacccacaaataatagagaaatactgcgagtttgtattcaattatattcttaccatgatagaagaattaatgaaaccgcgttgtttgtaggagaactatatcataaaatctttggtaatgatggtaggttggaatttaataattttaaaatcgatattgagtggctaaattcaaatggtttgatatcgttaaataataatgccataacaatagataaaaaggttgcaaaaacgttaatagattacgtttttgaacataaaactgaaatctgatcaacttgtcaaaaatcatcttttgtattaaatgaatttatttctgttttctttaaaactttttaattttgggtgggtcagggtttttcagtattcaaaatagactaattctcaaatcattataatgatttaatcggattggttaattacaaatagtaaagataaactcaatcattcaatagcccacattccttatcgttactttaacttgggccattaagattagtttaacttcagaatttcatcccgtctgctggtcattgataacatgtaatatttaatgttatttccgtgttctagttctataaggtctactggtgtaatatggatatgaaataaattgtaaaaaaatgtaagaaactaggacctgtttcaatactctttgtttctctctacaggtttatcatagtacttctctaaagcctttcccaaaccaatctgactcaaattttctatcaaatgcgtgatatctataaagatagaatttcttttacacagtattttaggattgctaacaaaatctaaaactcgtgttataacattattagtaataaactttaggattaatatttcatgaaaatgtacctgctatattgtcttcaaataattagatctttgtttgttactaattccttaaatgatttatatatcattatgtgtattactatattaggagagtgttaaaaatgaataataataaaatattattatattattggtttgacagtttttttgatctggttcctagtaaagaactctatgatagatacgaagtattcagagactttgatgatagttatagaggaatagatagtaagatcagtgtgttagatcacaattcagtaaatataccgaaggagatagtccgattaagagaatatgaaacacaagaagtgtcaatgtactggaataaaaaaataatggacacatcaataaactgaaaacctgtgttggtgtaagcgctaatccaatttactaagctcctttgtagagaagcaggatatagaattttatgtgaagagtaataccttttagggttatatctctactcgtagggcataattaatacgagaaaagcttgtaatttcactttatttgtaagcataatacaatgattatacaagaaagtacatgaaatcataatagaaggaaacaatccataatatttttgtttataagcaatgttattatagatatgatattctaccactaagccaacaaaatagtaaaaaaatgcatcaaaaagaaagaaaaaaaatgagccacctacaaaaagatagattaaattttcaaaaaatacatcaaattgcaagaattgtcgatcatgataatagaataactaagtatactatcccatggataataagatggctaaagacgatggaattaatggaaatgatgaaataggttagtttaagaaatttgctgtcaagtatatcgtgagttaataaataattcaattacttttaatgttataattcagtttttctaacctaatatatatgaacgacgttttgttgtggttataactaatagaatatcgctcaaatccaaaagacattagatttagtatcaaacacatagttcgataaaagagccttaaatactatagcctttatgatttattgctgagcagtaatcacttaactatttattatgttgtaataaaagaaaccaaccatcgatatgataaatcgaatttcatcaatcctatgatagcttgataaaacttattgccactgattatacaattctttatgggatttcagttaagggccacgggggattattaatagatataatgaatctaaacttttcacaggtcctgtttatttagcttcaaaacatgcaataaacaatgaatcatctagtccgcattaaacctaatcttctatttgatactaataaaaatatagggaggatgttacaaaagactagagatttattctatccgggcatggacgatcaatttggtgaaatatcttaaaattatcaaataatatcttgaattgaagaacaagaattcaactactaatcattcgctaaggctgtcatttatcacatatgctcaaatgattgaattatcgttattttttccaggttttcgaaattgtttacatacaccattttgctattttggtaagggagtataattatccacttcataagttacaaattctttgacattcatatttagaataatatttcctccaacttcagatgtttttgattttggaataacatatctttgtacataattcccaaatacaatgatcttatcctttgtttccttcatgataaggcctacaaagtcttcatttaatattttaactcctttgctgaataatgaatcaggatactagctcgtgaagctatggtcaatgtttgcgagatgatgatgtcgagcatcaattatatccccaacgtatgtcaacccatttctttttactagaatcttgatcgatatttttcttattggaagtccgttaacagatttctgccgtttgtattcatctcataaaaagaaccattatttctcccatttcgtttttcaaatacctccaaattattatcaatggtccattcatttatttgctcaatataaggagaatttaaacccatcacacctcgattatatatttaataatagtcataattacctatctcaattgaatctattaaaggtatcaatccatatctcgttattagtgcaatttaatcactattatatcacaatttttactttttcttatttggtgtatcatttgatgaatttattcttaaattgtaggaattatgttactttaataaagacccagtgcggatcctgctttgatttttccccgaaatagttacaacggacttccgttggttcatcatttgacattaattgaatgtgcttagagaaagttcttaatcttctaagatatgtatcctttgttgtcggagttcttgtggtatatacaaataatgaatattcgtcgctttctcccgggtattcatcctctacttttcgtatttctaatccaattattatttacccactctttgattaagagttctaataaagtagtaaaattatagcgggcccggtggtttccgctgcattttcaccactaaaataggactcatttaatgtaatcaattacataattaaaacttttatgactagaattaaggaagttttggtaaaggaatgttgtaattacaataatcattacagtcatacttggtataatcaaatcacgattctttttttcaatgactggataatacttgttctactatgtttggataaagggagaatattttcctcaatggcatcaattcatctttgctttcaaatgattctgctatcaaaattacatctttatttgcttgtagtggaatctgaaataattttggaataaatctttgttgtcatttagttgcaaatttatgttcttttttaagaattacttataccataataatccttctagtaaacatcttaccttgtcaatttctatttttctatagatatttgttaaataaaatctggaaagaaacataccaattgaattgattcatctatccaagtcattttgtgattcatttgtgcactcacaaattggacatcggaattattatggaaattcaactaacgtgattttgttctattaaaataaggaaatatacatagaactcacatttggagcgaggggagtgggattcgaatataagtttttcagacgtgggttccaacgatagttctcgattagattttgtcactcctctcgatttttttatttatggttactatatctgggtctcatttagaatacattgattacaatagtcaagacaaatgattggatagatcaagtttaaagaaattagcctcctcggattatgcaattgaatctagaaaaaatatgccgaccattttttttaaagtatatctttgacattgacattaaacttaaataagactattttagaaaattaatacgaaatgtcaatctctcgttcaatcatcgtagtcgatgacgaactagaacttgcgtctctattcaaagcatttttaaaaaatgaagggtatcatgtggtctctttcaccgacccggtattggctttagaatattataaggcaactgccgataaacattcattgataataacagacttgagaatgccaggtatatgtgggatagaccttgccaagaaggtaagggaatttgacagtaaaataaaaattttcttgatgactgcttttgatgctaaagatttggaagatcgagaagactttgaagatgcaagaattgacagactaattcaaaaacctgttcgtttttctgatcttcgactaatgataaacgaatcttttaaaaacttaacttgctgactcatatttttattgcagtcacgtgatgacttagtaacttttgcttttgctcctccgacaacctattcaaatctttttgatgatatacacatatcctcttcaaatcaatatcgtatttagaaggaagcgataactcaaaatttacaaggtcgtctatgcgatgtttaaaaggaaaggtgcctttatcggctatgattgatacaccggcttttcctttcgtcttagcatactccaccaaggttttgttataattataatcagagtctgaagatacgttacctgtgtatttttttaacgaatcgacgattattaatgatttttcggccttttcccatttttctatatctatggacatgtgtccttcagatagtatttttcgcacagaatcttcggtttcatagaatggtgccaattgaataacttcatttctttcctcaatccctttttttacatattgggaataaaattctcttaggattgttaaatcctcataaacaactaatgtgtgaatcccataatctgattctgatatagtattggatgcatttgctgcattcatctgaataatattattttcaatagatatttggtaacacctacctgtcttaatatgttcaaaaaactttataaacttcaccaaggctgcaagaagttattttacaaagtttgaccatcctctttttttctgtaagtaaataatctcttttgttataactcatttgcaaagatccttctcaagaaataaggagaaaaccaatactcgctattgattaatagccatcattatcttagatcaaatccataaagttcttcctcgatgggcaatcgtatatctggagtttgtaaacggttattcttaatattgatatcgtaataggaactcaatactctaattagtgatattgaaattgaggtttattttgatgtttgaaacaatataattaatttaatagagtaaaatttaaaattataatttatggtccattggtaaggaatacttaggctaaatatgattagacaaaaatctaaaaacctctttttctcggaaaattgggataattccaatcaatataagagatatacaatataatagaaacacgttattatacattgaaatccatgaaaagatatgtgcagaggcattcatcggatgaagactgtaaatcatgataatgatttgagagtgcacttataatcaaaaataatgagaataggcgggagccttttaataactctgaacattttccttcagatattttaaaggacaaagaaggcaatccatttacaaaagtaattgatgggtcagaggatgcagatagagcaattatagaatttgttaatagaactaaagaaaagattgactcttgtgttagttctactgcaccctcagtatttatagagataaaagccatcaagaatgcaagaattactgcattcaaaaacagaggggtgaaacttagatatgtgattgagatgactgcagaaaacttagagtattgtaaggagatgcttgaattctctgaaattaggcacttagaaggaatgaaaggaaactttgaggtagcagatgaaaaagaatatgtggctgtagcaactcttcacaaagcacaacctatatctcaacttatatttagcaatgtgcctgaaattgtaaaccaacaacagtttgtttttgatagtttctgggataagggcataccttcagaacaaaggataaaagaaatagaaaaaggaatagtctcacccgttaccactatttttaacgattacaagaaagcagaaagtaaagaattcgacatgattagagaagccaagaaggaaatacaaataatttattctactgtaggagcatttcatctccaggaaaaggcgggaacacttgaacttttaaaggaaatgtctgatcaaaaggaaaatctaaaaattagtatgcttgtgccaatagactcttcagtaaaaaaatcattatctcttgcacttttaactggtaatattaaccacaatatccaagttcaagatattgcacctagcattgacattaaaataaaatcatcagtggcaaatagcaaagaatgccttatcatggaaataaagaacttggaagaggaaaaaacaacaactccgctaattggtttctctatttattctagtagtattccaacagtgttatcatattgttcaatatttgaaatgatatataatcaaagtattcttgctcaagaactaagacgcgaaggagaaatcaaggacgattttataaatactgcagcacatgaattgcgaacgccaactcaagccattacgggatattctgaaatgaatgatgaattgtttgacattatcttgcaaaatagaaaaaaaatgacagatgaagaattagcaagaatcattgtgaaacttcatgagcatcatcaaaatatttctagaaatgcctcaagattaaatattttgacaaataatctcttagacgttgcaagatttgaatcagataatagtggtaacattttactacataaagagaaagtaaatttagttaaagagatagataatcttatcgaggttgaatttagcaataaagtcagagagaaaggtatcaaaatgaattttataaataataacctgggagaacaatattggatttattctgacaaattgagattaaaccaaattctcgttaatttaatcgataatgctatcaagttttctaaaacagccgatgttattaatatcatgataagagatagcaacgattttgacctcactttgaatcaaacagaattagacgaaactaaccatattacagaaaatagtaggaacttgtcagatgacctgataatagaaaaaaggaatagcgaaggagaacgaaaaaaaatcgaaaaagaagaagagatgatatatgttggtatatctgacacgggtaaagggatatcatcaaagattctgccaaggttgtttgaaaagtttacaacagactctgattttggaactggtctaggactatttattaccagaaaattagtcgaggctcatggcggtagaatttgggcttttaacaacaatgatggaattggttctacttttgtgtttagtttgcctagatgaaaagataagcatataattaattcgttaccgttacatataccttctaatctatttttcatctccctggtaatcgcataactaatttatctctttttttacttgatatctaaaactattttcgttctatccaaattaatatctgaaatagaaatttcattgaactatatgattttctaccttgtcaaagaacattgtatgcaatggcttgtagaagagaatctcaaaaatatatgaccattaacggcgaatccacacatacaaggtatgctatcggtcaaaaaagatgtggaacttgtgaattattcttaacatgggatcttgacaattactgtccatgctgtggacatagattgagactaagaccaaagaattcacggctacgaaaacaatttaataatatactaaaacaaaaagtgcaagatcagaaagtagaacgatcgaatgatctgttaacctttctcttatatttctgggtataattaatctcgcattctatatctttatctttaaactgttttctatgaatttacattgcaatctttaaggggatgaatcttgcataggctggaatcgtttttgatttgattttaattagtaactgagatctttcacctgtcttcatattttgatgtttatttgatctgagattgtccgtggagtttgacgaatcgatctcaagacaattgttaaatttacacagcaactgatctctaattatattattgtcatctacataagtcattattgtaaaatgattctttgacaaattgagcagtaaatctactgcttcgattaccaatttttcattatttttgaaatctctactaaaacttaggtgacggtctctatcagttgtatcaaatttatgtgaggatgtgagtaatgtgtccatgagatcaagaactataatctgtattttgtaattattattcaaggtaagtagataatcgggaatttcattgattataatatgtagcatttgatagaatgtgaatgctcttatgattatgatttcctccaaaattctctcaagattaaactcaaaatctaacgatttatttaccaattttaaataaagatgtcccagattgttaccattacccgcatctattataatcgtctttctcttttctatcgtattactgtcaatgttattaccttcattcactgtcagatggaaattgatacatacgttcaatataagagagtctagaaaatcagcagtgaatttagaatgagaattatttacaatacaaatatttcttttatcttcaaatgaaagtaactcatcaatttcaggaattccaaatagttttctatttatttcattgtattcgtcaaaggcatttacaaaaccacacttatatgctgttttatgaatttgcaaactaaatatctctactccttcttaatgtcactatcgctttttccatgtaataacattctataacatgttaatatgtattacgcagtgtagtaatgcgtatagttatatatagtaaaagtgagataatggatatgagttccttagacgtctccaatattaattcaaaatattgtgtatatggctgcaacaccaaaatttactggaataaattaaataatgaatattcagaggttatcacaaagaagaaacatttttgtcccaatcgaataatcaatagtaataaaccgacaggtgcagcggcaattgacagtattacctcatcaaagcccacattttacaaaaacaatcgcatgaataattatagcaataagaacaattacacttataaaaaatcatggcctaactcgaacgctaagcaaccaatggataactccgtggaaatattacaaggatcagcagatacaatcataaaacaatatgaggtgttaactgatttaataaaagaattcaaaggaaaaactcatggctctcaatcacatagtctgctaaataactctttacaaatagtaatctattatgaggttcctgaaggaaagagagatgaaattaaaggattatttaaagcatatactagaaatgaaatagaaattcatcaataatagtaaataattttattaatagtgaaagataggttcataacataattcggagtatgaacatttccattgaattgtaattaaaaaagaatgcaatagttactatatttttttgatgtcttggatgagtctgaatattacttgtaagagatgaagattatatcatattttttagtatactaatcctgcggcagtagtaacgtctgagacattcttgtattctttatcctctatctttgaaagtgatgaatatattctttctttattgacaggggtaatcttatcacgtataaattccaaaattttgtcctttcttgctggaaagttaaaatcttttaaaatttgaccaatctcggcaacatcagaataactttctacatttacttctttcctttgtccttctattgcattttgttcacttatgatcttacctgtttgtccttcaggtccgctttcgcttggaatttgttctcttttttctccatttaaatcagtcatggttatcattgatatcaaaatatttaaccctaatctaataaggcaattctggataagatcgaaaatcttttgctatcggtcgaatattggtattacttaaatctatctagatttgtaaattacttaaatttctttttattttagcgttataggaaatatttgtttgtttagtggaaccttcaaaaatatatggcttatatctttttgaccgctctataagaatgctttaataatattgatacccttaaagttttcctattttgcatagtccggtggtttccactgcattttcaccactaaaataggactcaaacattatggttacaaactctaataaatatttgcataagttggaagattgaaatctattgtcactacatatcagacaagtatctccgagatggattgcattcagttttaggataataaatgatcaacagggcagatccaatttgagcgatccagattcacgacctaataattgaagtcagtgaatagagttagtctaatgataaatcctacatcctgagtttttttacaattaaagaggtttctatgatacagtcaatcatatttgggatacatcatatatttcgattattctatccaatttttcaaatactttagaatcaagaataaattttgcttcttctaacgcttctggctttagaggataactacatttagaacagtatttattttctaacatgttaactaaatcgtatttgggacagcttaacactattggctttcgcttttgcacttcttccgtgatgataccgttatattccaatatcttatttttaagctcattgcccattctgttttttatatatctagctccttgtttagaatttattcgccagcggacttttttcttcaacgcatattcaggcaaataatcggagtcatgacaaatggatgaatggcggatacaataaggattaaatcgtttactgtttatgagtaacgctattttgtttctttccatcatgtctgcaatctcatttgtttcaaggagtctaataattctcttttttaactgatccatcattgttcggagagcctcaggttttatgggagctccagtatgtaaattgcatattagccttacattaggttcatttctaaatggatgctcatttagccaatcttagacatagggaaatgacactgtcagaagcaaaggtcccgaaccagttttggcttgaaatggaatttcaccttctccgtatttttcttcaagtctaatgtttttgatacgtaatagggtaatttcgtgatttcgagcattaagatcccacattaaagcaagagcagctttatttctcttatagggttcatattttattatagataaaaattcatccttgtcccaaatttcagtttcagaatatggacttaacctatttgttttcttgggtttaagggatttcaaaaagtcgggggttttccattcatccatggatacgctgttatttttgttgtagatccgtcttatgaagtgctttagtctatgaacatagtcattataggttgttatccacttttggtctggatccaagtctttatcgtttatctttgattgtaagaatgttaaaatatcatctttgttgtcaatctctgttagagatttagtgttaataaattgtgcaaaagacaggattgctttcaaattgttgttttggtgtctttctgatgcaccattttctttcataaaatcatggaattctaagattaaacaagaattattgctattagaaagcctcgttatctattcaactgtagtggcaagtttagcgggcaattaaataatatcctccccatagctttgacagttcttcattttctctgttcttaaccaatgataataatgaggctcaagtatatgagtccacgtaatcaatgggcccaaggggtttcgtaatagatatattacgagttcaaattttgaattttttataaatcataaatcttctccataatcaaaggatgttatgtagcaggataacgaattttagacctcgcatttctgttacaatattgatttttttctggtactactgtaccatataataaaaaaatagagagttgagatatttggataccagaaacttcaatctgatttctatgaagtacctctgccttcattcgttagaaagacgccctccttggtcatctatcaccctagaaggtttaccttcgtcctagctaatggtaaatacaaacggtttggtaacattaccgggctgcatattctctgttaggtaataaacagtggcggttgctggtgtcttccccgccttgattgcttggtataaagtgccaggaactggaccagcaactgtaacctcttctccttggtttaattcgaatggggttgaagctgcagtgcagccttggaatttatcctgtcttatagccacattggccttaaaaaaggcggttagcggtgagtcacatcgcccagcgggtaacgtaattgagtctggtgaattattgactactgttgctattagctcaaaagtgttgcccgtctttacgtttaaaggtgaaggatgaatatctataaggtcaacgccagtagttgtcatatttgatgtagagtttgttgttggagattgggagtatgaatatcgatcttgacctaatggaacagcgaggatggctacggtgattagtatagctaataatggaaatacgacaactagattgagcttgctattaattgctgtcactatattcttcttcttcgtctgtttcgtattcattgccctcatagggcatctgtcctattttaccttatctgaatcgctagtttcatttttatatgaaaaaaaatggaaaattctatatccttacaaatttagaagcattatagttgtttcatgaacttttatgctaaatccaatggataatttgattacgtcaaacccatgtggatatcctcatgatttgcacgagattaatttacctaattagctcaaaaatttataattttagctttgtttattggagtatatgccattaatataactaaataaaataatttcaatttaactaatagaatccatcgtaaagacctgatatcgtcctgaagaacaccgggcccacacagaataaaatcgctttaaaatgagttcagaactttgctttctgttcttattagatatttcaattggtacttgtaatttgattccttttatacgacctaatctaaaatcctttatgaacagatgaatctgtactgtcactagatattcatataactgcagattcagattattttcatgatatgcgtcataaaaaagatgatgttctgatccatcgattagatcttatctaaaaaaatggttagtctagtgcttaagggcgtccaccatctggacccgtaatacttcctgatgatattctcgcataattattagcccttgtccattcagatccacaaaatggatttaactcagaccagaacttcgttagtttaatgcctgtctgatctattagtaggaccagattccgtttgctctagtttgtccaggagggacatctggccattgaccatatatccgggggtccaaaaacacattgcttgacctctttattgcttttgtgacgcgcccaatttaattgccgttcgtctcatcattatacacattactatagttgaagctgaaagcagtgctcctatcaagaatattatattaaaggccatttcattaggaatcggttctgttgtacctgatactgagatgggaacaacgaagagagttaaaaacacacctgaaataacaggacctatagctccacctataattctcatggttgtgtttgttgatgaaaccattccagtcgcctcttttggtgtatagcgtagcatcaagttgggtacaagcataataaagactccgcctaaagcaaatcctaaaagaaccattgctgtttgtacgggtgtagaatgaaatagaaatagaacaaccattccaatcgtaagtattacgcctccaggtacgatgaatcttaaactaccgcgtttgattgccatgaaacccactataggaccaaggactacaaataataacgcttggggtaattgtaacaaccctacataaagaacactcattcctaatccataaggctctggtgtctgacctaggacgggaattgtagtaaaaaccaggtactgaacaattcctagcatcagaaaaatcatattggctataatgacgatcctgccaaatgctagctttagattgacaagcggttttttacttctcttttcaatcattaggaaggctgctagtgaaactactgctattgtcaagaatacccagaacaaggtagctccttctgcacccatacctaagaaggtaaaagtcaacataaatgctgaaatggtaagggtaagtgtgatcagtccaggtatatctactagatctgtaaacttttgcttctttactttgccatttgtaccttctttatcttttttaataactgtaggggctccaactttaggaacaagtttccaaagtaagaataacaatactaatgtaaacggaatagccgaaataaatacagcttgccatccaccaagataaacaacggctgcacctaatactaaacccgctgcactacccccttggtacatagataatattataccctgagccataggtagtttcttttctccaacaatttctcttgcaattcttatagaaactggaacgactgctacggctacaccttgtaaaattcgaaggccaataagggtataaatgtcatgagctaatggggccaaaattactcccacagtataacaaataaatacaataagtagcattttttttgctccataaaggtctgctaggcggccaattattattgttacagaagcccctgatacaaggtaagctgtaagtacccaggtgataacgccatagtctacaccaaattctgtcaccatttcgggtaaagcagtggttaaagatgtgtgaacgtaaagtactaaaactatacttagacccagtatccatatgatcaaatttgcatgtttatatagtggctcgtgactatctgtatcaatattgtcacccactttacccatgaatgtagcttttttgatttgttaaatatatagtttaaatcaagatgtcagccgctgcaatttagtgtaatctataactataagaatatttaatatatgttaagggcccataccaaaattatctttctgtataagattatacaacaggagaattgtaacaatcctagataattctcgacagtcttttcataccttgtaaacagttttctaaatctgttgtgccatgagttggtacgctctaaaacccatcttttaggagaatatttttcgcgaaaataatgagaatgcaagaagaaaagcaagtctacgaatataatacattattatgagaatgaatatttcttcaaaaatttacttttcttattttaactttacacatctattctaaataatcttataagtactattatcagtaacaattctcatccgtgggggcgcaccaatgatatctaaaactgatagatagcaatcttcaaatacaattgatagaaatagacaaatttagagaaggcgaagtctaaatagatatggcagctatgattgctattcatgttgtttttattagagatttcatttcagcggatttagttaaaaaaaaagtgcgattacttttgttgaaaaagaggtcaagtatgccccatcagattatatcataattgatttttctaatgtaaaatcaattactcccgaattcgcctaccaatatttgatgagtaagcgcaaaataaaaaaggaacttcacgaagtgaatctaccttcacatgtggaatcgataatcaacaaagcacagatatctatcaataagtaatatattctcttttggcactttgtagttattttaatattaaaatcaattttatataatcggttgagtttttcctaaactaaatcctcatgcatctgactcatcaaattataaattggaagtgagtatcataataccgattcatagtagaaaccatactaaagagtccgattttttagtaggatcatctgaatcgctttatttgaatccatccattaaagaaagtagtaatctatcttatgataatcgcagtaaataatcaaataacattttcatattcctagtgcaattccatttggctagtaaatcatagtgataaattctatcctgcaacggcgacatagataggagttcctaatacaactcttctgtcatcaccacctcctgcgattagtttttccgcaagaaattccagattttgtaaaggcccctccatttgatctgttgcaagcaatgcagcctctaaataagattcatcgttgagagcaaatgctctacgctgtccttctatctcatacttatctccaggaatcaaaggaatatttaattccacacttaatttgtttgctattgcaaaaggcaatgaatttgggttagcatgagaacttagtttttctttttctaaaacatgatccattgatccacccaggcctaatactgttccagcatcggtaaaaccgccaaaataaaccaactgggacttttcatcccaaccataagagccccaacgcataggaagaattcccttgaaatattgttttggggaatctactgtcccgatactgccttccttttctagaaaactagaaattaaatctaatttatcatagagcgtttttccactatccggatttgctgttaaagtattactaaatccagcattaatatttgattcatcatcaatgttctccaagatagtcttcagtatttgaggataaagcatatctattttagtttttgaaacatatagatagtgtttcacatttatttcacgattttgtatatatcctactaaaatgtaaacttttggcgactaattcgatttttttgatgttgatatttaacctattgatccttttacagacattcccgtaaatcggattagatggtagacacttttctgtagcattgattattactccggtttgccagtaaggtagatgaagtgagtaaccgatgtaaccaataatgagtaagaatgattctggaaatgtgaatgatttatcctttttggttttattcatcttctctagatcagaaaccaaactataaagaaaatcatatgagcgaagaggcgggtctcactacctcgaaccaatgatctaatgtaaaaaagccagtctatcacaaatcatcaatctgaaattctcaatgatgacattgagaatagacaaaatagtgagaactccaagatagattttctgtatttaatgatttatcaggataaattgttagcatatttgtgctaattgatatatgtctctaagtactactgtcgttatcttgttcaatttcaacatatatctttgatagattggcatatggtataatctctcttaccttattttctatgttgtcaattaaagattcaattttatctgtgtctaaattttcaaccacatttacctcaatggctattagaacatcgtctggagcaaggtgcatcgaacgaattgaaattattctctttacctctggaattttagataatatatcattgattcttttataatctcttcttgttatagcttctcctatgagcaatgctttattttctttggctaaaaacactgcaaaagccatcaatatcaggcttattataagtaggtttgattaataccctgtaaactcctcaacctttattctttctttcggaatttccaattctttttctagtagtgattgcatcgactttagcatatctggagggccacttacatagaatattgaattattcaacatattgttatcaacatattttaaaatcatttctttatctattctgcctttctctcctttccattcctcggtgccagaaacgttattcctttgaaagttatcgtcactaagggtatagattatttgtatatttttatttaaagatgtccagtcatcaaactctttcttaaagagtatattttgctgattcttgtttgaatcaaacattattatttttaatggtagctgtttgtctgtcgcgtaatttatcatacttcgaaatggtgttacccctatacctccagacaaaaatattataggttttgaataatcttcaggtaaaacaaattcaccttcaggtccactcgcgttaaccttatctcccacttctaaggttgaaagtctctgtttgtatggcgaatctcttattttggtacttagcatcataaaattctctgtaggggatgaagaaatagtaaaatgtctagttggacctttgtcgtctcttacaacattatctaaattaaaataggcatattgacctgcagtatactcaaataaatggggtgtttgatatttttctaatttattaagaatctgattaaacctaaaagacattacgccagtcccttcaaattttattttttctatcagtacaagttggaaatcaaaagatggtttcattatattttttcttctacttcagtaaaatgtcatcattatattttaacttcgcatattgacaggcttatgggcagaaaggcactcgtattttattaattgaaccaattttgtgccacaggcatcttaccaattatctatctagattttcaataggccaatggatatttgatatgaataaacgttgccagtatgattgatgtcaataaggaaagaaaatagtttgataggtagataaccattcgcctttttccgttgtgttattctttgaatgtataatattatcttcccatgctgtatattatataacatattatgtaataccaagaatatcatgaatattatgtatctaatcgtaattgctgttgcaatatcaactattactttgataggggtcatgacaagttcgacacagggacaaactcctacagcgtcagatttaccaatgactacaattaacgaaacaaattcgaccattcaaatgttaaataaaactctcccagctgaaaatgcaactgacgtagtgcctgaagttcctatgtaaaatagaatgatatgaagagaacagtcgagttcatagaaacaaaaatattaacgtgtttattggtacggttctggttcgggattcggttccggcgtgggctcagggacaggttcaggtgtaggttgtggttgtgggtcagggcttggatagggctccggagtgggtggtggttcagaaaattgaaaattttcgttctcttttttcatatctccattcgataagtttaccatatttttctttggtgtgcggactatttttgttttttcagaacaaggtaagaaatagcatgaccttttaaataacgttcgttaattttacgatgaatattattttaaaattatttcaatgcaaacatgggaaaatgagtgatttgaaaacgtctataacatttcataaacaattccatgtttacgaatgcgtataatttactagttagtaaaagacctaactagtttggactaaagaacttttgagtctcaacataggcgttgcctaattcgtttgaagtatcattaagaagtgctcctgctgattttgaagttgtcactttttgagttgcattgcttaggaattctccagtatcagtaatagctccctttatagaattagatgcttcttgttgtgccgttgttttaatggtactattagcagcggttggggcgctggtttggtttgctgttgaatttgtttgtgtcggtgttgttgttgctggagtactagtagcattaggagtagtaacggctgggttgctggtttggtttaatgttgaattagtctgaccatacactgaatcccaagcgcctgttgtacctatcaatattgttccaaaaataaacaaaattccaaaaactacatgtatttcttttttgtatttcatcatattcataggtttaagatttcaaattcatgcttatatccttatcttctttcagctattctaacattcacgccataccaacatcttcttgcagtcttattctcgagttattataatcacagagatagaaacaataaatttagacacaggattttgcaagagatagtaatgaaatatttgattttaatttaatcttttagtttgattacataatcaatctaagaaatccaaaatgaaaaaatgaaaaagctaaaccaaacactattttaaatccaaacttcatcttttgttttaaatcgggcttctgcttcttcttttgttagtttgaatcgtaaagtatggccgtcaaatgtatcaacaaaggtctttgggatactgtatgttactttatctattagcccaactttagttatgacattttcttgacgaatctcttgtacttcgcctaaatcagcattctctattcctctagcttctttttttaacacttgactccagtctacactatcaaatgaagacatcactagataaccaaaaatatcacatttaagcattgatagggtaaatatgcgtctcatagtgccgtcatttggaaatcatatatttttttgatgaacgtgaagtcaagcatcctttttacaaagaaattagcccaatttagactatgatatttttctattatagtcacctttctcccattttatatctataaaggccactaactcttttgattcagtatttataacaggaacagccgtcaagactctagtagaatcctcagaatcacgtttgactatgattcgatgtttaaatttgtgggtgccgtcaggcaacaagttaatataattatcatgctttggagaaaccatgatactagttttcataaaaaactcataaggaattagtaaaatcttactactaaattatgaagctatagagaaatacaatcactataccattcaatcctaaggatatacttgtatttcgaatctaattatttcgcacttattttgtagacacgaaagactcggtccatattcagaccatcatatttctttcaccatttgtttaaccaaagacctgtgacaatgattttcatctttgcaatgacagaggagtgtgacggtatcaaattttgataatatatcagagcgttggagtggaggtttctcatgttcttcctgatgtgaatccagactaatagtagtcctatctagcgaagccaagttttgtaaggccttgaatgccaaaggattgtttagtgtttccaatttatatctacgagagtattcatcccaatctattttcttgtctttaagatactctttccaaagtgctttactaggggccaactccttccaccagacattccaattctcgtcttctttccgcagatatcgtggtctatatctggcaatcagaattctaagaccatcagattcttctgtaggttcttttagagatttaagttttatagcatctgcacttaccatagtatttgtacattaaacgttttccaggtttaagattaattaaataataataaagatttacgaataggctgatgggggaaaagatggtatatagatatgctttttcttccttcctaagagttttccatgtctaattctgtgtctattttaagggtgtttgtgtcctttttcttgtttgccattccccttggtccaggctccactgtgtcgcctatctcatctactataatttcactattatcagctgtgtcgccaacgtcctgctggaggtcatccttcttgttgagtggtttttctgacattattatagttaatgcaggatagtttttattgcatatacaattagggagattacaagtttggtcggctaagttatctgatgaaacgggaggcccaaaagcaaaattacaagtattaatcggattaatatctactgtgtcgtttgtctgtttccaacaacataaaaaaacataagtagtaatggtatcagtcagtaatttgaaatagcagtctattatctttttaaaccaaaccaatactattcgcattatggggatcgattcgattgatgagaaagaaaagttggtcatgaaattattagaagagaacaagaattttcaggagatagcaaaagaggctcatgtgtctttttagttttatttccagggtaaaaaagaaaatgctaggtcaagatttgacagttaacaaacggctatcaataccgccgcaggctctaaagttgctttcggaaggcaaatcacttattgaggtaactataacccttgacagacccatcagaaacccgaggatatcatagcgactttcttagactaaaaatatggactgtttattgtctcttattgaatctcatatagacattctcccgacagtatccaaattaatcaaacatattatacagaacccattcacaaaaaatgatttaataattgccctagaattagtttatgacattaatcgattaagaaacattaaaaaaactttagaagagaaaattgaaatactaaacaaagcaaaaaaccatttgttaaatagcaaaagaagaatgaatcaatattagtatcataatgattactcggaaattggatttgatgccaacgtggagggatttaatcaaatcatgtaattttaaataacaatgtaaaatgattcattggtatagtcggattggacattttgtttttggcttttatttccggtacgtcaatgaatcctgcccgttcattgtccccagccatattttctggcgtatggactagtctatggctgtgttggacagccacatttgtcggtacctcgttagtgacatttatttttagaaagaaattttattgagctggttgcggcatttcttccatccttgtttgcttattcattgaggagagccgtccgcatttccataatacacagccaacatatctatcacattgactatctttgagaaattgaacattcctgggataaaaaacgggagatacctcaacaccctttttcaaggatgtttgcttacgacaatatatcatgccatatttgttaccactcccatttcaaaaatgattttaaaatctcgattttcaacaatttccaaaggcatattcaagaatacaatatttattaattgaaatccattaaagtttgaatattctcttactactcttttatcaaaaaagttcgactttatgaccggaggatttgatgttactaaatgcataattaccaaagaccctttacttctctttgaatggtacagatttctataccattagatgattcagataatagacttcatggagaattgattattccaaaaacagtaaaaggtctaatagtatttgttcatgggagaggaagcggcagggctagtcctagaaatcaacgtgttgctaatattctaaactacaatggatttgcaacttttctagtagttttgttaactcagggagaacaacaatctgacctaaaaagtcaaaagatacttgaaaaatatcctactctaatgctaaacaaatttaatattaagcttcttgctaggagacttgaaactgcaacaacttggctaattgagattaaagcagatgttaagaatctaccaatcggctattatggttctagtacaggcgctgcggctgcaattgaggcttctattcttctagataaagtgaaggtaatagtttcaagaggggtatctttcttttcgtctatgatacttatagtacttacttttcagaacgacaaatttgacattttatggattgtgaactccttggtaataatatctctcagtttacttataccatacatgatctggcaaaaatttttaggaaaacaacaggaaacagataagctaaatgatattatgtatgatacaattgagatttttgaattaaagaaaattcaactagaattcaaatataggagcgtatagggcgcttttccgatctatataatatacggatttatgcctttgtagtctataaataaaagactaagaaaaatgttttttggacttgctatagaccttcttgtttctccgataatagcttttgtgaacgatgacttgtagatagctagaaaatttgatgtctcaaagaatctagaaaatcccctttatagaaattctataaaagaattgaataggaacgtactacattatcggaattcggtgggcttcgaatccatgtggtatatgggatctgttaatttaataattatttatttatcacaaattccttcatactcgttagccaatccgtgaatataccattatctatcgagtcatcttagtcatatagttaaggatttcttctagtttacctttaaactttaagttggtatataatatagcgatgaagtgacaatggctaattagatatttgaattttttttaaaagagggaaggtgtgtctctttatacacaaaactatccgtaattacccaaatatattctatatatgttgtaatttatttataagacaaaattgttttaaggcggtaaaaaccaatccgacgattgagatagtgaatattactgatttttcatatgatgtggactgcggtagatgattgcgccgccctaaacgggcggcttccctttattactagtaatatgtatttaccaaaaaatctattgaatgccactgctgttattattactaatagcagtatcattgagaataaaggaaccagtatatttatctccagatgtactatgtgccagtatgccgccgccattaaagctaacagatccatcagttacattttttaaaagtgtgctgggtacaaattttttatctccaacttcccaaatctttttggttgcgtttgcagtttgttgtccatctgtaatctgttcaaatgaaataacatctgcaggctttgaaagattgaatgtaaccattcctgtatattttagaccatcactagaattttggaaaataataacttgatgagaaccgtgtccttttgcattatgtggtatcgatgtttgattattttgttgttgttgttgttgagctaatacgttgttgccattctccaccaatatctgacttataacaaatgttaaaccagctaaaattgctatggataagccatagactattacttttttttcaaaagttggttgcatatcatctcatccatgatcaatattggtaattaaagtattttgttatgaataaatgagttaaggcgtatccgactaattttgatctccccagtcatgttgccctcaaaatgattcactgttattcattgtaagttatagagcgcgctattgacaacatcccgattagatttttataattctttgattttttaaagaatctgggatctcatttctaattgatcttaatgaacctaactaaagtgttaaagaaaaaacttgagggaataacacgcatctagggtttctcaattatataaaatatttatcagctctacatttgatacaaattatttcctcgccttctttatttccttctatagttatgaaggtaacacaattacgacaaaatataaaatcgattagattatctctatgatctctactctctagtttctctttagttagtttcaagaatcctctatctggtatagtgatcttatgtaaagtttttgcagtcaatatacttgcaggtgttttagaggattcttttaggataagttaagacagataagaaaaagattcgagatgttagttagtgttggttcacctcgctaattatgaaattaaccaaatcaatgttcccaatgctatgaagactattgcgccaacgcctccgctactttcttgtagttcttctagttgattgtatatcagcaacttcgctatcatctgtttagttgcgtattgggcaaatgcaagacagctagaatcatcatatgtaatagcctgtcgatactctaattcccatttatgttcatccaaatactctaataatatttgctgagattctggttttaccccatcaagtttaacaggtaaattatactttcgcgtgctaacgactattaggtcaaccttactttctatgttattccagtctgtcgtcgtagtagtagtcaccattaacctactctttgcaagcaatagaatagttgatgcccaagatgacaagaaggaattcaggttcgttgttaccacatccagtgccgaggcaaagatctggcgccccgtcccaaaagaaatgaatactgcagcaatcactatcattatattttgatcgaatgaaattacaatcaaaactgcaataacccaagacgctataccaatgacggctgcgctaaattcaaagtagtgtgtaggctgtccaattaacttgatgttgtattctgctcctgactttgttcttctgcgaagaaggaatacgacaatagcattgacaaaaagtaagttaacaaggtgttttaccatctctttcatgatgaaagtcactccgcgggcattttgcacgatgacttatgttgagcgacgcatttctttaagaatgttgtatgtaagcctgagctgatatatcatggttgaattggactagagccaaaaaagtatgacacatgatccttacgggccttgccgtacttacttttattacaactatctaaatgtaaggtcgatactcattctccatttgtgaaatttcgataacggaggtgaaaattattgatatttctatgttcagcatgtacaatctcaaaggccgaaagtctttacctatttggtatatccagatggcttaaatgaatttagcgccaatggcgggcttgtcgacattcagcagctgtcatggaaacgggtagaagagtgctgatatcggtttttgatttggattcaatttaggattatcagaagtaatatactaattcagaaagatgttagtatataaatccagtgggatatgcggcaaaaatgaagtggaacttatctttctgtatcacaatggatgattatttagaggattatttagagaaaattaagttagataaaaaaaatccgatgaaacacataagacagttaggaaatacgagagtcgaataactctgaaagttttggtgctattagattaatagagttaaatccatctacaaagataactgctcctttttcctccataccttttagttcatccttaaacccttgaagagtaattaaattttcttctgagggatgagtaaagacatgagtatataattcatcaattgaccatgttgtcttttcaggcatctttaccgaacacagcttgtataattcataagcaatattatttttataagaattcatgatccttacattctattctgtggaaactcttcacaaacttcatgaatatagattagtcaatgttctgcatcaattaagacgttatcgtctttgtttttatttttgtgtttatcaccgtatttttgggttcctccttcgtcgatcatcctttgtctttctatgtcactagtaggaattgacttgttgtctttgtttttattttcctcgtgcattgtgtatgtgtaaatttataccatattatttaacattaggtatattatgtttggaacaaaaaacgtcttatacattacttgatttatttaataaaaaggagataacaataatgttaataatgtcaaaaatcgtctgacatttaactttgtcaacaagctgataaaactatcattttttatactcttctgctgtcagtctgataagaatatctaattaaaataatgatatcttagtgttatgcaggatccgccaatattagtaaggtgttggttaaccttgtattaatatgtcacttgtttcccatgagcacatcttttgctaacccgtactcgtattcacttaataaattagagtgacaacttttactatgtccaaggctgtctgaatactctaatgattctacactggatatgggaaccatgccatcattaggttttggaagattatcgtatcctccttgctggataggcgaaaatagtgatagatcgcagtttcccatatcaggattccaatcacctgcaatagtgtaatatttggtatttggattctcctttactttggtatctgcagctccgggccttaaatcgtataccgcgggtgtacatacttcattatttactgctaatggagagcctgcattaggagttcctatcattattaaatttgcaacatcctgagtgctatttcccaaatacatccttgcatctaaaccgcctttgctatgaccaactatattcactttattttgaccagttttgtctgttacatcagcgatttgactcgataattcttttgcatgttcagcagctgaaccacatttgtcatcggattgcttaaaagttattgggaaaactggaatattgtcttttttcaacaaatcttcccactttttccatgtggatgcatcggataaataaccatgtatcaagagaacaggtaatggtttagttgcattactatttgcaggagtagtggtagctgagacttgaacataaatttgttgaagtgatataaaacaaacaaacatgcccaaggcaactaaactaaaagaagccaatactataattttttcatagtttttacttttcaaatcagtaacaatggtatataataccttaaatagccacagtaaaaacccaggttgcaagagctaaaatttgtagtaataactaatatacatgattcctttcttatcaggatattttggtaacattaacagctggtctatatattagattattatattgaagttgattcttttcaccttatctatttaatctatattaattaccataaattgaatgaatcattctaaattgtggcctaatgcatcaatcaaaaaataaaataatgtcgattacattatcaatacttttattcagtgggatctatgttgtcgctttatcaatagaagagtacaatactgttcaagcacaaggacaatctcacaatactactaatactgctactcctatgaatgctaatcaagctaatgctacttctgctaatgttacaaaaccagttgatggttatggcggtgcaccaacaggtccgttaaatgcggttcgacacgtatttgatgatccgactcttagagtatatcatttttgtaaacctaatgacaaaataatgatggtatgtcaattatatgatagcagttctccgaatgcaacgttgataggagtagaatatatgattgactctaaaacatatcaagcattaccagatagagaaaaaccaaactggcattatcataaggaagaattctctccagacagagcaaatccaaaattcccattgctaaatgatcagcaacaaaaggaatggttggtgaaattatcagagtcatatggaaaggtcatactgaattggaatcctatggatatattgcctgcattcccgcctcaaatacaacaagtacaacatccttttatgttgaatcaaacagtcaacaataatactgaggaatatgttggtagctttaatcaaacattagactactgaccttagcaaggattaaggatttaatcagccgaagtaacaaacctaataaattttattctgaagttgggatgccatacatataagccatctaatcaaatcatcctgacccatgtagtagcccgttcagtcataatttagaatcaataatcattttgtttactacgaaatgtaaacgcaaaaagtaaaataaataatagaaaaatacgtttaacaagctgtatattcattagttgagttatttaaatttttatacctatgttatttcagtgtcaaacaaaaaagaaagtatagaaaatctacaaaagaaattaggtgaagttctaggtttagaacgagcagctcaaaaagcagtggatgaattaatattaatgaagctgttaaaatctgattccaaaactgaagcaaaagagattcaaggagaggcaagtacacatgaggaaaagattcaagaagttgttagtattttttctgaagataaaaatgtgcatttagatgttaacaaagtagaggaaagtgccaaagaaacagaggagaaagcaactaaaattatgaaaacatatcttggtgaaaagccagatacatcagaagcattagaattcttatgtttagcagaaggtggtgaggtcgctcattatgaagtattacaagctatctgtggaaactttgataataaaaaggcgttatcaacagtcaaatctatcctaaaagaagaacaaagacatcttactcaatgtatcgatatggcaaaatcggcagtttcataaggaaataatcacctaggtcatcattttaaaaaatggtctcttatatttgatataaagtgaatcggtctttactttgaagtcagtggaacaattaaacaaagaaggatgggtagaaatatgcgattaaaaattcatagatttgatcctagacctaatgagcaaagtccatttacccttctctttaccaagggaactaaggttattagttacaatttcagcattaatcaacatgatacattagtttgcattgaagatgattctataagtgaaaaagaaaaaagaacttttcaatggattagggatggcgatataatagagaatctagaggattataaatatctcggaacaagtaatggttatcgatatttattcgaaattacaggaaaaggagtagactaattatcaaagtaagcgcccttccctttctttaataaagatccattgtttttgtttaaagaatagcagtaacagcagggcaataacgcccatagttgaaatcactactaacaaggccaatcgattttttagaaaagtgaattaaaaaagtcagtaaatggatttaataaattttcagtttccgatgagggtgtgggatgaggtatcgccaaatcaaatgaacttacggtaaaaggtgtaatattcttatataactgcaaaattattctatgttcgccatcatctggaaaaatataatcaactgaaaagtgacctccagatataggaattagtttattttcaaatttatacaatcgtccatcatgatctgttagagtaacctttgtgttcaggttattaattagtgtagaatcattaaggtttcttacctcaaaggaaagtcttgtgacttgatctattatcggcacttgcggttcaagtcttagacttatgttcaaattatcttgttcgcttatccaggaattattcttgataactgacatatttgcaattgaagaaaaagcttgacaaggatgaataaataacacaatgataaagagtatagataaaatctttataaagtcagacggtgcactcacaggtgaagttagactcaaaatttacaaaagtattatgatttatctcactaataaaacatttattttattaacagcctatattggtaaattattttaggtagtttcatccatatggcgaatgtatttagaactgaagtcttttctacctttgccaggcttgaataatcgatttattaactttgcaggatcagaccacattaatccaacttcgtcactatttcgaatatttaattttagttccttccataaccatggtggatttgcggcgcctccatgaaattgtccattttcttgaaatgttgagttaggtctatgatgccaccatttccaaaatccctcttctggatccagaatgtcaactaattcatagtgaaaggtaggactatatgcagtgccccttcctttaaaaatagatttgagatcatagtattttggtttatcacctggagcataaacaactacatctggatagatacttagtaaggaacgaagccaatttaagattttggtaaaaggatttatcttggtgcctagagcatttagaccatgttttcctacttcttgttggattagaggtcttatgaaatctatacttacgtcaacctcgagattataatcctcagggaattctttaccggacgcttgcttgatgctattctcataagcatatagccagaaatcgtgatgtgctactgttatcattcccaaaagcacttcattaagatccattttctcgaggatcagaagacagccctccatgtcgtttggatgagtatcatcatctgcatgataaaaagcataaagaataaaataatgggtttctgtttctgcaactgaataataaactactggtaaaagaaattccaggtcaatctttcgtaatctttcccgaatgtttttagtatcccaacataattccagattgtcctttttttgcttatagaagttcaatgtaatcggaacaagaagatctttttttgtttgataatagttatttgctgaataaagtctgatatgttgatagtttataggagcccatttaaaggccaagtttttgtaaaattcgttgttgtgtttgatcattggtaatgttgaggatgctaaggtataacgactagagaatgtttaatcatatttttttgtcattagggtttaggatttgtattttcatttttttcatttgtattttctattgcataggctgctgctgctgaactatgttattctttcacaaaaagaagaagatgagattgttaacagataggatgtaggatgtaaagccatatgcattcattatcttggaaaatatgtaatatttggtcccactgtaacaggctctacggggagatacttttgctgtcctcctactaggtcttctgcgattctaaatgccagagcagaaattgttaatgacgagttgactcccaaagaagtaggaacgatagcaccgtctacaacacgtaagtcatcgtagatgtctgtcaagtttgccccatcacctttgaatactttaccaaaatcgtctactacgccttcatccctatcattacccatagaacagccaccaagattgtgtaatactattgtgctatttcctggaatatctgctgaatcccaaagaggagttgagaaacttgaaactccatcctttccaatagtttttgcaattctttccatctgatgaatcatttttgagaaaagaggagacaacttgctcaagtcaaaatccacgtctaacacatctaaagcagtcatgtccctgtttggatcatttttccatgtgtctttgagttttatagtgccatctgatgaatctgtccccattcctgaaaggagcaatacattatcgagatcattttctgagaactgcaaaggtatatttcctgctacaataggaatcggaggaggattttgagaaatcattgccaagacagattgaaccgaacctgttcctgcaaatgtaagcaactttctaaataaagttccatttgaaagtaattttgatattccagaaaacatttttggtatactgctatcttctatagtgtaaatgaaattggatccttccttaaactttattgcagaagtaactataggaccccttgtagcatagacatttgtctttgtaggatttattactcctaatagatctccgttagtagaatatctatttcctaacttcgtgctaactttaagttttaatcctatagtcctagcagtattaactgattttagtagaatctctgtgcttccaattgctcctgctgcaagaaccagttttttgcattcgatcgttctcctagttccaccttcaacgaaactaaacatttttacatctaaattgtaggtatctggaccttgtggccaactaaagttgtcttgtttccactgccttgatccaaaatcgatgtaatgtatcttgtatttatgtgaagatgcattaggtaacggctcgatatcaaatacctcacaaaggggataaacaagaagatgtttctttttgctttggttgttcaaataatcaaagattttcttgttatttgtatgacgagcacctgggatacaccctaaagcacacctgccttgacgctcacaaatatttggctcatccatatattttctaagtaacagagatgctttttcctgtaaattcgagttagactgcatggaattttttacaaaatcaaaaagattgtcaggaataggagcaggagatggaggcactccataattagagtttcttttgttaaagagggttcgttcatcctttctaaatggaaaatctgatatagataggtcaactgcaaaaatgtcttctatgtatggatgttgatttggatccttatcggggcttgcaggatcaaagccaggtgtcgtcttgtttgttattattcctgaacctaatgcgtcttcttcttctttgatttttcttgcggcatcctgaaaagcctttgttttaggaagtttgactgtacccaatgctgtgttagttgaaattctattgacaccaataaaaccacgtgccatgtcaaaataggtctttaagttagcataattaattcccaaattcaattgggaatcccatgaatctatcacattttcattaggttcttcagtaacatttgtataaactagggagccccctccaactccgctggcagcaagcgtgtgaaccttttttgaaattcgataatcgtagaggcctcgtctatcgataatcctcgatgtgttaagaaattgattcattccattaaggttatcgggatgtgcccatgttctgtgaggaatatcgtttgtatcaaggtattctcgtattccctcatcaggtgtagcaggtggtttcttttcaaattcatgagaactggggctcaggggcaattcatggctgacccaccattgtccgcgttcaaggattactagtttacgcttgtctgcgtcaggctttagtttatcctcatcagtaaactgattaaccaaagataatgatacaatggttccaccaaatcctgaaccgataacaactacttcggtttgactaagttggtttggatttgtatagggagagaaggggctgctaaactgaggtgtttcatgaatctgcgttccattattatcaaagaccttcatgtaaacattgggttcggcatttgaagtttcccagaactctgtgggttttctgaaatcttcttttctaaaagtaattttaaaagttccatcatctagtgttactgcctcaccaatgggatcgtctcctaatatgtcaaatggtggatccttatcatatgcctttatagtataatatgataaagggtttccactactgttagttaattttccttttagttcatatgacatattctataatgctatggcaagaataaaagtattgcttttaattagcaatatcatacaaaagcaataatatcagattaatgcttcacattcaaacatgatttttaaattcaaataaatttttattttaaaagaatattttgttcggataataataagactttgacaaaaggcccggtgagcttcgaatccatgaggtacatgggatctgttacttccatttaaatttgatctttgaacgtctttactaaaaatggatatgggttaccgaatctagagttaaataaaaaattaggatgttaatgattcttctgcttcatctagtacttcgtttgttgcattgacggtttgtttgatttcttctattgatgcattactatctatctgtgaagctagtttttctctcaaaagtccctctccttcttctgataattcttcaccaattggttcctctatatattcaaaattatctagataagcggctgttgctagttctttagcctttatagtatcgtttgctgaatatgcatctatcgtttgattgagtaatgatctaatattcgagatatagtcttgagtactattttcattatttgttgatgtcgtatttgcagaagtattgtttacttgtgcaaatgatgctgtaaatgtagtattatatattaatgaagatattgaagccacaacaagaatcaaaattatttttctttgtagaatgtccgtaaacacattggaagcttctagaaattacatatataatccattagtagattctcttggcggagaatatacgcagatttggtctgggacatcaaaactattgtaatacaacgatatagatactatcaaatctgaaaatctggatcaaaaataaatagggttttctccatataatatttgcactgactcctagaatggcgtaattcacaatctcaggaagcctgtccgcaaccttaagaaaggaaagtatcaaaggctacaatcatgtgataagtatcttaataaaatacgaacagtacaaattgggcttcatttaccacccgactatcaggatgatgataaaactgatattgtctttcagttttatacaaaagcatgagaaagttcccaatgcgaacttctaattgatgcctttattgcaattccttattcaaatcctcaatggtctaaaatattattatgattatcatgtctataacatgacgggaataattaacattacgactgtagtttgtagcaaaaggtctagatgtcaataaacatctactcgtctctaaaccctatatgaaaataatatagaactaaactcaaaccacactctaggttgtattatgaatcaaatagccagtctaaattatcactaatcacgaaaagtgaatctctattcataagtcaattgaccttgttaatttttggtgaatttaatataccatgttaatttttataaaccataattgttaccttctatgctgaaataatgcctatagtaattatgtaagaatatatcaatgcgttattaagcatatttcaagaaattacttttttgtattattaagatatattaatgatgaatgtaaagtaagccaatgttaaaaaagcaatttttgatagtcacttctattctattggcttcattttcaatttttcctgttatagacgtgttcgctcagaatcagagtatgaatttcgtgtattatactagttggggctctgaaggtgaaggtgatggtcaatttagtggtcacaatgatgttgactattttaatggaaaggtattcgttccggactatgagaaccatagaatccaaatatttgatcctgaaggcaattttattgctaagtttggagagggtggagaaggtgatggtcaattccacaaaacatccgccttgtcaatggattctgaaggtaatatttacgtagcagatcaattcaattatagaatccaaaagtttgataataacggtacattcttagcaaaatggggctctgaaggtgctggtgacggtcaatttttgcatccacatgttcctgcaaatgatgcacaaggccagttgtttgtaacagacagagaccatccaagtgtccaagtattttcaacagatggtgaatttctaaatagatggggctctgagggtgaaggcaatagtcagctttcaaatcctgaaagctcaattgttgactccagcggtaatgtgtatatagctgattatggaaatgatcgtatacaaaagttcagtaacgatggaacttatctttctcagtggggcacaaaaggtgtagccgatggtcaattccaaggaccatctggtctctcaattgataacaatgataatatttacgttactgataagaacaataatagggttcaggtctttacaaccgacggacaatttttgacgaaatttggttcaacgggctctggagatggacaattgattgatcctgagggagttggagtcgacaaagaatccggagatgtatatgtagcagacacgggcaatttccgcatagtcgtattcaagcccactggataattttaatatctatattttttacaaaaattccaaataacaacattggctatctacaatatccgattaaaaggtgttcagtaaatgaaaaaccatttactttattcttgcctcttagttattactctgctgtttgccaatgtggttgggactacggtgacagctcataactttagtacagatgacaattctaccttccttactcttataaacatgatattaatcgaaaaccgactcataaacaatagcattatggaccgttcagctaatgcgtcattgcattctaactatgttaagaatattaacgagataattgatgatattcttgtaagcgaagactctttgcttattgatagtgatcagttctataacaatactatgattgcaacaatgatggctaatttgggagatgaagttttgagaaaatatggctatgcatatggtgtcccttcaaatattatgctttatatgaatttttcagccatctataatttcgaaaaaaacattggcaaagaattgaatccaaataaccattctagtcatgatacctttgatgtaggtaatgtagataattattctgctaatcttaaagacaaatcccagtattatgatgcattggaaacctccaaaaggatgatagaaatttatgaaaatgacttggactcaggagatacatccatgccaactaatagctctttatcccttttaaaaaagtcattgaatgagcttaatgaaaacatacacaattatagcaacccttcaaagattatggaaattgttcatggcaaagtgcatccgaatttgcaattagcattcaatctcacattgaaacgataacagtagtcaatcgtttgtttgtgaggacggagatcttaaatgcacaaatatggcgatcctcaaaacagtatcgtatttcaatcttggattttccctcgcatttatcagtatttactgaaactttctctataaatatgaatcaaaaactaaaaatgattaattgtgatgtatgggaacgtacaatacattatgaattctatggatccgaatccatatgttacatgggaaatgttgattaaatgaatatttattttaaagaaaccaaattggacgggttatttagaactataatattacaacgtgcctcggtggtttccgctgtatttttaccactaaaaaaggactcaattactatttgtaaagaattaattaaacctttgcaaacggtatgacacttacactagaatgcaatgaatatggtttgtcatttagaattagtcttaaaaaaaataaaaactagtatttgaaaataaaagtttgcactgaattaggttctactagtatgttattcaatactttgtaagtgccctcaggaaaatcaatcactatcacatattttcctggtttcaaatcttgaaatacaaactttccttctgatgttatatctacacttgttgttttagaaagaccaccttgtcctgcagcaaggacttagatttttaatatcttgtattattttaaataatataccagatgttagcagcatgtgaataaatacagaacatgaagaaatgaattttttatagttttattactgtatatcataaaataccagtataaatgaattacaaaatcgattttaatgaaccaattcctcaaatgattaatagactaaaacaagaacacgtagaatttggattagctctaaacaaaataacaaaatataatgacgaatttaagatcaacgaggcaatagaatctatacatgatatgagtgaatcaataatcaaacatgcggttgaagaagaagcaaggatactgcgtgttataatgcataacgcaaaagaagaatctacagattctattaaaataatacaggaacataatggggttgtagattttctaaaacataaaataccaaatatagagaatcatatttaccaacaaaatgaacaggatcaacagtatcaacaagctgttcaaaaagaaattaatgaatttgtcgtaaatttgaggaaccatttttccgaggaggaacagattgtttttcctctagcgctaaaagcaaatttgagataaacaaaaaagtacaaaagaaaatgaggtaaggtgaatgaaaaaaaagctagatttcaatgggcccggtctaattcatcctactaacgatataatttagaggttcaattttattattatataaagacaagtatttttttattattttacgtatgcacctaacagacttccaactaaaaaagctactacagcggcaattcctcccatcattaacgtatttaagccagatcttacaggcgatttgtcaacaactttaccctttactagtccaattgaaaaaaaagcaatagcagtaaatacaatcgaatagaaaaaaacattgtctatagtatatatcgaatccgacaaatcaaaatatataaaatacacaaaaataaacggaactaagggaactaaaccaattaaataaaaagcaaaaaaagttgtaattgctttgtatatcggattttcattattattgtctattggtcctattttctcttccatcatagtatcaacccaaacctttctttttgaaactatgactttagtaatattttcaagcaattcatctttaaatcccttttccgaatagatatctttaatttcttgtattttctgagcagggttattttcgatctcccattcttctctttttctttctctttgaatagattcaattcttgattttgacgataggaaatttcctatggccattgcaaaaccatctgcaaatagatttgcaaatcctaatatcaagactatagaaggcgaaagtgaggctcccactactcctgctacaattgcaaaagttgtaacagcaccatcagttgcaccatatacaaaatcctcaatggaccatttcaataacagaaatatatcagtgtactatattatacactatgatttgtaaatatggggatacaaatgaaaaattaacatggcaagtagtccattgataagatttcctattataattccgacttgagaaaataaaaataaattggttcatttacctaatataaaaaaactagattctgcataaccaaattctatcatctaaaaaatgaaagagaaaaataaagatatagataaatagacaggttcttattttaacgattgggttatagaggtgtctaaattcacaccagatgattttcatttattggcagttaatgctgggattataggatcaattttcatcttttttgctattgcagtacagctccccctacaactatttttgatatagattcagaaaaatgctcttttggattccatcttactagtgagcaggctcaaatttctgttgtaatttctgttgggattctgataatacccttttcaatttcctcgattcttattatttctcatatcagaattgcaagtttgtttacaaacattggctttgcattaattattacaacggcgattttgattataagttcgctttcctgcctaataccttcgactttctttaatgttttgatggttttccccgatgcaatatcgatattagttgtaattctgttattttattttaggcgaagaaaacctacctctagttcctagaaaatattttctattttcgttttctaaaaactaatgcaatttatatatcctcgtagaacaaagagccgctatcagattctaaccttaatgataatcatcttttgattatgaattcctacattatcttctatcataaaatgtatactgccactattttgttttccttaatgaattaaatattagagaacacttcatctctaattgtgtgttacttcgttactaaaatagatggaatgtcagtagttctagtaataatatcattctatgaatgctcctccttgatatagataataacttatctataattttatgttatatcttgattgaattaaattgctttaatttgttaatacccctaccgatttcaataagggatgaatgggatcaaattccttgtggtaagaggagtcggaagattggcaaggaccgtatatatattatcatatatcccctcttttgtttgtcaatagatattcgatcaaaaaatagtgataattatgttattgcaatagttttgactcaattatatatcattttagaacgtaccggtgacattctaaagaaaggattaggctgacctatgttataatcagatttagtattacacaaatagaactaactagaataaggtaataatcccgaacagccaagactatcattagtaaaatctactaaagctgttgtacttttaattaatttacttttaaattctgtaaggaaacaatttatttcgtaaaggtaaacataaaatcaatagtattggagaaaactttaaggattaaagttttttttggtattttttgtagtctttttggactcttttaaggaaggcatttttcctaggtgtctcttaccttgtgaggttattgcaaccgatgatttatcaggtgccaacataatgaactcatcgacaagtaagcattgcaaaacgttgtgtcttaatcttacattgtctggagaatgttctccacatacttcattatatatagcaatgaaatttacttcttcccattcatctccttccgtagcatcgtataatctcattaaaagcttctcagccaaatcttgaacggttttgtttgaaaaagtctcgatcaataaacttattctggagctgatgattaaaaatatgccgcttgagcaaataagctattttgtctataatctgtagttcaaattttaagatcctagaatgtgtaacccacacaaatcaaactaaatattgagacttggttcgaatccgtcgggattaacgccgataccggtattctaaattgatgattcacatcgctattctttgataatccctttatttttttgaacttatttcccttagaactgttccatattctaggtgaactttttttctcatataaggaattaatttgtaatgaattgaataatatttcttatcttgagtaagaattcctttaaccaggagagatactatgcctccagccatctttgaaataggaatattctttcctattgaaactttatctctcatctcacgatattccattggggtaaaataatttttatttagttccagaattaatggccagacaatatattcccatactaatctacgattttctgtggaggatgcatattttccctttctatttgattgagtataatcactatgcctgtatttttctactgtcattttcttggtctcgaatgataaacaacccgatagatcctcacaattcattttgtttaacaagttttataatgtcacctattattattgctggtttggaggaaatcatgcaggatttgaattacctaatggtattactaattctccgaatgagaataatgaaagaccttttcgtctgataggatttgattcagctcactaacaaagtgaaaaatttgactctagttgttgtaatatgaaaaaactcgtataaacacaaagattcgatcatcttatatagattatttactataataaggtaattaatactcaaaatcaggttaatactcaagacagaaatattatcacaccaactaatgttattacaaatgcagcgcgattcaatactctgtttaatagtttacagttaggtggtaatcaaattcctgtgagcatagccaaactattaaccgtaatgggtgaacaagataacacaattagaatattatccgatattgtagggcatagccacagtgataaacaactacatgatatgcataacaaattatttggaggttctgactcacctaatgaaaacatggatctcgaaaatctgtttacatcaataacaaattttataaatcaacaaaatcaacaaattcaggagcttataattaaaattaaacaaaatgtgcaacatattaagaatcaagtggtcctattagattaacaaaaaatcaatatgaaaaagtattagatttggaaacggttcgaattaaaatcgaaattctataacttagatataaaatcttcgaataataataataaatctaacgaaaacatacaaaatctatatgggccgggtcggatttatattgttaacggtacaaatttgggatttgtaattctgtcattctgacatttgttagtaaagggtatctttaactactgtttgggaaaatcaagggatggggcccggtggtttccgctgcattttcaccacagaaaaaggactcattaagtatgtttaattaaataattaaacttttttataagtaatttgctgaatctaaaggccaggtcggatgtttttcaaatgaattttatcctttaatcagaaaaatgagatgtagatcccgcaactagtgcaataaacgataatcaaattattttatgtataatatttgcagtccaaattttttatctaagttaggatataataagaagtagaatatttgatttcctgaggtgtcagtctttaaaatattcaaacttttattatcaaaataaaggtcaatttacttacgtaaaaccatgttactggactaccttatatatcatatattctttaatttgaaatatgacacatatagcaaaaataatagaaatagtgggctcatcggacaagagttgggaggatgctgttcaggtggcattagatgaaactacaaaaacaatccacggtataactggaattgagttaaccgatatgacagctaaggtggatccaaatacaggaaaaataactgaatatcattctacggtaaagatagccttcggggtggaacattcctaaggatcggcagataaggaacttgaatttccttttttccataaattagctttattttcttgtcgccctttacctttaaaaagtgccaattttatcaccgttagatttgtaaaatccgaaaagagataaatgaatagataatcttgatgaagagtttgaattcttttaattcattaatggaaaaacaaggacaaaaccattccatagatatttttcattttttatcaattaggaaagcaagatgtaggaatttttgaatgaattatggtggaccaaaacaaagttccaatctgcatagattgctgtgactaatattcagccatggaattgaaaaggaaatcatgacctaattatgtttaattgtttttacattcaattattatcgttgatttcgcatttagtgattggagatacgtctggaaatatgatatcatctttaattcttgtaataggtccaaccagatgattgcataatgaactatagcagtaaggggtgttttttcttacagcattttaaattgacaattgtttagctaagaatacactagctgtaagaaaattacccccttagtcctatattttgttaaacatcttgctaaagtatttgtcatcttttttatacaattttgggaataaaaacgagataaaaaatctgtacacagtaagagtctggtcttataatccacaaatctatacataagcaaataggtaagaaacacgactataacatctataaaaaaagaaccgtcctgaattaccaaagaaagtagaaaggatgtttgatcttggatatctgggagtagaaaaagactttcctgaacaaagatcatccttaccttttaaaaaggaaaaggactgcgaacttactgtacagcaaaaagagtacaacaaagaacattctaggagaaggatagcgatagaacatgtcatttgtaggataaaaaggtacaggataatgaacgatatctttagaaataggttgagaaagtacgataaagcatcagatatagtaacaggattgataaattacaggatatcaaatatctgttagttatagaaatcaacgatagttaaaagacactgttaacctctgctaattatgcaagagatctagtatatcaaagatagaactgaaagttttgatgattattttccttgtcgaaaagaaaaatgtaaactagaacatttaaaacgatggtttgagttgtttgcatatcatcataacaaaattatcaaaacttaactttacagagccgggtacatagctgttatgtttttattgtcaatcacaatgacaaactttagtatacttgtgctaattggtatagacgtaaactattgaaaacattcatgcattttctgctttaacagtaatacacgacaagaaatacagacacatacagaattaagactaaatataagaatcaggcaattgtgattttgttttattatctactttactatattacctaccactatagtgatattttttcagtttagaatagcatgttcttttaaatgggtttatgacttaatactgcaggctgctcatatttgaaagtaatttcgattttatcaccctgttcataggtacaattattgatttgtcttggaacgttgtctgatgcttcaactatgcatgttccgttctgtttaagaattaccgtaacctcttcgctcttgccaggagacaagacatcaaatatctgaaatccagatataaagaagacagcaagtacacctacagcaaccagagccaaggcaattactttcggagataaatccaaacaaatgaatatagattaactcgtatattaccatatctatatacacacaagctctggtgactgagaatatacaaaaagcaatgaataatttactatttacatcgccttgtgttatttcaattgaattaatcacaatatttaatccaatagtctgattttgcactttctaaaatatctcatgtaacagatactaccatattatgacaatgtaataacctctttcgtaaatcaaaaatatttttgactatgaagatcaaggtattagtatgggagatgttaaaaattttataaatgctcctattatagataagacggtccgagacttcaatgatggtaagtccacagcattgattatacccaagtagtttccccgagaattgtaaattggaaactcaagttaatgtctttaatcaaagacttatggcagcaagcatttacttaaatcaaaagcttatgctgaaatagttttaaattaatcgattagatctacctaaggttaatgataaacgcggttcaaagctataacaatgaagttttaaataaagaaatgcttgatgtgtgttatataaactattttactaaggttaatcacatgaaagatacaaaattttggagttttacctctcaatctagtaaaaaagcaatatcgattaccattgcaattcttttattcaccggaatctatgctttcgccatttcagtagagcagtacggcaccgtgcaagctcaagtacagccaaatagcactagtccttcacctatgaacgctacccaagctaatgctacttcagccaacgtaacaaaaccagttgatggttatggaggtccacccacaggtccattgaccgcagtaagacatgtatttgacgatccgactctaagagtttatcacttttgcaaaccaaatgataagataatgatggtatgtcagctatatgacagtaattctccaaacgcaacgttgataggagttgaatatatgattgactctaaaacatatcaagcattaccagatagagaaaaaccaaattggcactatcataaagaggaattttcgccagaccgagcaaatccaaaattcccattgcttaatgaccaacaacaaaaggaatggttagcaaaactttcagagtcatatggaaaagttatactcaattggaatccaatggacacattacctgtattcccgccacaaatagaacaggttcagcatcctttcatggtgaatcagacagtaaacaaccagacagaaaaacacgtgggtagctttaaccaaacgttaagctactaatctttttttatattatttctttaaagccatgataattcaggatttgctatgcgtcatgatcagaaattactcttttatctgtaagattgttttctaattcatattttcgagaggagaatggaatggctaactcccacagtttattaataattttttgttgttgacttactattgattctgaattattccaaagtgtttggtcaggttgttctttatgattgtgaaaaataaataacatatatgccctctcgtcaaatattccgaagtttcctctgatcccttccagatgcctcatgttaggacagtttaaagaatctatgaaaccaaaattatcattcgtagtttctgtaatcatgcgaattttaatacctttgtcctcaatcattttctttgcatgaaacataccttcttttccatatttccacaagaaattgaacatgtttgcatcccatagagtatcaaatcctttatcagctatgtttacccaatcggttataatttcaattaccttttcctggtcaaatatgacatcggttataatgggagtggaaattggattctttcaactgttgaaaagttacctcatgcatatgataatttactgtcttatagtattataaaaaactttgccaatactcatcgaaaactgttactaaaaagaatggcgggcccggtgggtttagtaatagatatattacgagtccaaatcctaaatctaattacttatcttgtaaaaataactgtaactttaaaggatgttcacggtcatattggtataatatacatgctgcagtttaaatttataattttattaaattgctaaaagaaaattatactatgaacagcgggatcaatctctataatgaggcaaaaaagtcggtttttttatctataatttaagtgataaccaaaaattagagcccatcggtagtggtttcttccttcgatttaaaatagaatcaagaccagaaaaagcggtaggatatatgattactgcaaagcatgttttactaaatgataacgaggaatttattcaaaaatttgttattcggttaaaatcaaaatcgaaggaatcgcagtttatctcgatcgatttacatcaaacaggatacttcattcatgctgaccctcatgtcgatattgttgttattccttattatcctcaaattgacctgaatgattttagatttattaaaggagaaatggtaatggatgaaggattaaatggcttgcaagaaggcgccgaagtcttttttacaggattatttattcaatatactggtcaaatagaaattcagccaattttgagatttggacgtctttctatgattccagtcgagaaaatccaaataaaagtgaatgaaaagattatgaatacaaatttttatttaatagaatgtacttcatttggtggtaacagcggttcgcctgtatttctgaaacaaaatggagcagaaattaatcgaattgatttagctgatttgattacggggagtttcaatcagttcgaaaagttgccatacgacactattttgaaacaaaacaccgggattgcggcggtaacaccttcttacaagctcaaagaaattttattatctagcaaagcttacgatgcgagacaaataactcctgattaatcttattcattaggtatagtgtgcttagtaatcaataagatgattacagaaaacttattttaatagcctactattaacagataaatttccaggtaacataaatcgtcagtgaacctactccgaaatgagtatttttggttctgacacatctaaattatctagatcaagtagtagactcattaactaaatatcaattatatgtgataaataggaacgtacatcaaattattaattcagcgggcttcgaatccatgaggtatgtgggatctgttacttttatttaccttatgaattcgatgacttagttaagtaaatgtataattcatgatgagtctggcagttggaaattgagtccattgtgcaggtggatcttaatacatatgtggattggtaatgtggccagaggtttccgctgtgctatcgccaccaaaaatggattcaggactcttaaacatttatggtacaagatataactttattattaatgtcaattgcaaatgttctaggatgcagagataatttctgtttttcacataatagtactcgcgaaaaacacaagcgaatctgttgagtgaatttctatccgcccaaactttcttcagatcatttcacaaatttaatttccttgacctcattatattataggtaatgttatatcttaccaaatctcaaataagcaaacgtgaattttgttgatgacgatggctcaatcatagtaccaaagtctgtaagaccaattattgaatattctgagactgtacttggtaccaggtctggagcattaaagcaattcagagccgggaaacttcacattcgagattacggcagctactattcggttcattcagataagattaatccatcagacgatcccctcggtcatttgattgtcgatgctcccgaatacttaattggtatgctttcagggattaccacttactcaattgtaaagagaaagataaaaatgaactcgaaaatgagcaattcaaatctagactccttaatagagccgaataatcgggatcaactttcaccctatattgcaggaataattgcggcttatacaagtcacacattcgtcaattcagtaaaaaattggctcaaaggcgaagctaagctttggaaaacgtagaaaatttggatccttctaattcttttgaatccaccaccgctgcgacagagattgacacagatacaataaaatcgtcccctcgggtttcaaaattttatcttgcaaaagtagtgatcaaacttgttccgattcttttttatcttaggagggaccgccgggaatgggtaagacgtgagggcagaaatattgacaagaagaaatatacaaaacacgcagagaaggcactcgctacttttattgctcttggaccctcctatataaaattaggacaatggctatcaactagaactgatgtgcttcctcaaccttatctggaagttcttgcaaaattgcaagacgatgtaccgcctgcggatttttcaatgattcaagggatagttgaaagtgaaatcgggagcatagaacaggttttcgatagctttgaaaaaacagcaaaatctggagccagtcttgggcaaattcatctggctcgctatgggggtcaagacgtggtcgtaaaggtatctcgtccacatatagaaatgatcgtctcaagggatatccaggtgctaaagtctatactcccattggcaactcgcttcatagatccaaatctaaagtactctgtcgaagcaatgttttctcaatttgtagaaactattggtgaagagatggattatagaattgaggcaacaaatctaaagatgattcgaaaaaacatgggtcgggatccaactgtattaattccaaggcttattccggaaataacttccaaacacgttttatctatggagtacatccctggcacaaaaataactgatgtagcagcattggatgccatgggtttagatagagggcggatcgtttcgaaggtacatcgagtattctttaagatgcttctcaaagacagcgtatttcacgcggatccccacccaggaaacatctcagtgaaacctgatggcaagatcattatttatgattttgggatggtgggacggatcgatgacgagacacggctaaagttagtaagattgtatctcagtatgattgaaaaagatcctgtgagagcggtagatgtgttaattgatttgggaacactggaaccttctgttaacagatacatccttgaaaaggcattggaattaagtatcagatcacttcacgggcaacaagttgacagcatggaagccaaggcccttatcgatctaactaataaaacaatgagcaaatttccatttagacttccaaaaaatttggcactttacatgcggatgacctccattcttgaaggaatttatcaacaacataaagtcaaatttaaatttgcaagggtgttggaaaatatcctatcggaagaagggctttttcgagaagcatatatcgaagaagcaaaagactatttccagcggtttataaagggcgtagaaagttcaataagtcttgcgcctatgataagatcatatatggaggccgacttgcgtatgaaggagacctcgtcaagcagacaatggctaacttccctaagcattataggctcaggactattcattggatctgcggtattggttcagtataatttaattctgggagtaggaggattctttgcctccgcagcaacatttatcggactcattgcgatcagtagaagaaaacattaacgctagtctgcaactcttaagaaataggaattgtattgtaccgagggatgggtatccgtagagtaacgataccgtcagcgtacgttgcagaacccaacacctggtcttcctcagtaactgtgattggtaactgaaccttcttgttaatacgtagaggtctttgctggaggtaaattgtatcagcgcttgactctccttccttctgccttcttgcgtttatggaaaggacattacctagtattcttaatgaaatatcctgttttgaaaaacctggaagatcaattaaaacgactagcacggaaccttcttcatacatgtctattgcgggcatgacgaattcaaagaattccctagacttattttcaatttctctcatcaattctttagccatataatgtgctaatcccataatatatgtagttatcatattgttataaagccttttacgaaaggacattagatcttaaaccttctttttgaatcctactaggctcgattattatagtaaatgatatatcaaaaaaaagatacgatgaatttgttcagttgactgactgcaccagacaagatccaaattgggcttgatttaaatgggctgtaaggcttatggctctaaagttaactagatttcttattgcttttcaattagaatatcttcgaataatgacttaaagagataaaatatttgagatataattaagattgagaaaacctattgttccctagagaattagacggggacgtactatataataagaattcagtgggcttcgaatccatatattacatgggatctgttaattaattaatttttttgtaaggaaatcaaattcggatgatctacaatgataaaaagttatgttttcaaaatgaaccctgttgatatcaatttgatattagttctattaagttgattttatctggaatcacaagctaatgagcagatcccagtttactttattagtcaaatcctatatcataaaatagtcagattgctatagatattttcactatcgttgcctattcttattatcttatcacgtcgccctccagattacattgtaattgcttcttggaaatgcgtaaacagttcaaagtattattttaaacaacagaaatgcctgctgaaatttcatcgtcctatatattatgatgacttcaagtcagtatttgtagaggtactgatgtataatttcaagatctcacaaaaccttatttgtgatggaatatatcataactgaatcatccatgtctaatacggagaacaatgacgatagcaagattcatgtcgagtcgaaactacatatagttaaggaactaaacggagtactctctattgaaaacgcagcagcggtgaggatagcttcaagaatagacaccacgccaattgaaggattaaaggaaatattaaaaaggcatttggatgtaacaaatattcaaaagatcagactccaagatatgattagacaatttggaggaaagccaactgatacaaaggccgacttgttatcatcattcgtatctactactactactgctaccagtacaacggagtctgaaaatagcctttcggaaagtttagaaaaagaagaacagaataagatattaaaacgatctacgccacaggactatgaaattgtactattaaggcaagatttcgcaataaatcatgatgaattaatggcttatgaatcgttgatagagaacatgcaagttatggatattccacataagcaagagaatatatctatacttgaaaagagtatgaaagaagaagaactgatggtctattggtataaaacacatacacctttgatccttgacagtctctggccaaaggtaattcattctactgtgagacgaggtcaaaattatcttcttgaccatatccgcaccaagatcccaatagtaatcatatacgctgatctggttggttccacacagatgagtatgaccctacccatagacaatcttgtttctatagtcaggatttttgactatcacatttcaaatgttgtagatacccttggtgggtatgtcttaaaatatgccggggatgcagtaatctctttttttccaagtcgtgttgacaatcagaacaaatatctttcttcagatacagcagttgaatctgggaagttgatgatcaaatcaatccaagaagaagtaaattcctttatgcataaaatatacaagtatcccgagctttcagtaaagatagggatagacgctggagaaaacgcaattgttcagtttggttacgatcaacactcacctattgacatattaggatatgggatgaatgttgcatcgaaaataatgtctgtgaccggtgcaaataaagtatctgtcggagagaacgtttacaaatcattaaatcctgaattacagaatgaatttcacgaactcacgatcactgatcgatggaaatatgtaaactatggtactgataggccttacaagatatatactttgaatacatagatccatatttgacagaatccaataaattaattgattattgtatgaattttcagaagtatctatgttctgaagatattcataaaagttcttaattacttgtctgttagtctgattcgttactttgatgtctatatttgtaatagtagtagataacttagcgggcaattatgtaccacctcatctctattaacttatacaactaagaattatttgaacccatgtgattaacgggcccggtgggtttagtaatagatatattacgagtctaaaactacagattgatcctataaataagagcaattgtataggataagccggaacctggaaattaggttactttacaagtcctttggttttaagtcgtaaatatatcgagcatatgcttatagaaatccttagattttcatcaaagtccatcggcattacgtccactcgtaaagtttatgccgactttagcccctaccgcggtaatgtttgtcattctaattcccataatttccactcaatccttagtggcttcgatggtggcaaatttatagaatatgttccctctaatgaatacttcctcatttttgatctctatttcgaggactatccttcttggtccacttcgaatgatcagatgctgtggcttgtaatctatatcccataactcagaggagtttacgaaccaaacattatcagaaatagcaccatataactttcctttactgtcataaagagggaagtctaaagatagataatttccatattttctccttaaagatatgacatcaaaactatctacttgtaaaatgtgttcagtattaatgaaatttaaattacccaaatgcacaatcaaatctttacccgttacctcgaacttgtccttgactatttttttattatgagggtttttcttagcatctcgaagaacactttctggatagtgtccatgatcagctcttgtatggcaggttggacacagtgaaaccatgtcttcagatctaaattcatgactttctctaaaaggtatgatgtgggcattctctaaaatcggacaaccgcacatcgcacatccaaaattagactcttgcctgagttgtaattctattctagcaggggtattcctgtttttgcatcccatttctaatactcaatattgaaactatggtttatttaataaaaaagtcaataatctaatacaatctttgtgtacatctaacaatttaatttatgaatgagactttttatataattgcttaacaaatttattgattttagttttgaataatttagtatttccgacgagtcattgctattttttaaatcctgaagagtggagtgaggataactttaattttataattccatatgtaaatcggcccggtgggcttcgaatccatgtggtatatgggatctgttgattaattaatttttactgtaagggaatcaaatttggaagatctttaataataagttaagtattcgaacgggcccggtggacttcaggatacaataaaggatggtaattaggtcgagattcaaaaaaaattataggatttatcgaatgactttgttttattttattttatcccggagattattcatcatcttcaggtaatttcaatagtcgagcaacattttcgtcagttacttttattccttgtttatccgtgggtggggcagtgtgactattgtacctgaaaaataatcctccaggcgtaatcaagattccaattcttttatccggtctctttttttctgattcatgtatgagtctgttgacatcatctgtaagtttgaccaggatatcgtcatgaacattttttctctcttccattgtcatcgatgtatgtatgaaatggttaaatttatccaggtcttccttagcaaagtctacaactgctgctgctctgcaatgactaccgtctccgccacattcaatcgtgccgtcaccataaaatgtacaagcttttaaggccataatatctatatgtttgtgggatatttaatattatccccaattctaaacaatatcgtagtttttttgaaattcacaatgcttctcctcggattgacaaataagcatctaacagaactcatagtgataaatttaataattgaattcaattgaactaatcctctgttccgcaactgctgagtgtttcatataatttgaaaattctgtagatattcataaaaatcgttaattatttgtctgttggtttggtttgtgaccttgatttagcaatattgtagtaacaatacaatagcatttttgtctatgatcacttaaatataagtttgaatattgcatttgtatggcaaaaacacaaaatgatgatcttctttctttcaattatcctccttcaatgccttatattattgatcaaatatggttaacattaaaccctgactttgaatcaaaaacgctttttggagaagagcaattgaagctaactgctagacagaccattgataaacttgaacttgattgtgctacagaaatgaaaatcgtttctgtttcattatcttttgccgatcagtcaaatgatccaatgacaaaactagaatttgatccaccgatcaatgataagcttgtgatcaaacttggcagcagatctgtacaagaaggaggtaaatttcacctattaataaggtattctactgttcctagtaagggattttattttattgatgctcaggaaaaaccatataaaagagatcgacaggcttggactcagggagaagctatagattctaaatactggtttccaacattcgatcatcctcaaatgaaatttccacgtgaagtatcggtcattgttcctaaggagcttgcagtaatatctaatggtgaattggatataagaaaacatgatattcatgatgtattttggtctaatgctaaagaagataacatacaaaaggctatgtatgtatgggaagaagtaaatccaaatcccgcatatcttacatgcattgttataggcaattatgaagaaactagtaatggatttaactataaggatagagtgccactacgctattatgttcctaaggatagaatacaggatgcagataggacatttaaagataccccaagaatgatggaattttttgaaacattttttggaattgaatatccttacggtaaatactctcaagtaataattgaagattttccatatggcggtatggaaaatactacatgtactacacttatgcgagaggtcttacatgacaagagggcacatctggattttacaagtgatgacgttatagcacatgaattagctcatcattggtttggagatcttgttacatgtagggactgggagcatatatggctaaacgaaggttttgcatcatatagtgaagcactatattggcaatcctctaggggagagaacgaatttctttactatttggtacagatggcagatatatatctcaaagatgctcaaataaatggtaagcacgaattagttaccaagaattatcttaatcctgactccttgtttgatttaggtcatacatacaaaaaagggggatgggtggtacatatgatacgtcagtacattggtaatgaaagttttaaaaaatcattgaatcgatatttggacaaatatagaaataggacagcagagacagatgatattcgtcaaatttttgaagagatatctggtaggagcttagaacgattctttgatcaatggcttttcggaaaaggacaccccgaactagatattcagatttctcaagaggaaaataataccttaaagctaagaattatgcaaatacaatctgatgatactgtatttaactttccgttagatctaaaactaattatattaacggctgatggtggaattgacacaattcaaacaactatcgaaatatcggaaaaagtgtcagaaaaggttttccagattccccaaggatcaacagtcaagtgtttctcaatcgatccggatttgaagatactgaaagaaatcaaaacaattgatactcctttagagatgttaatagatcaacttaatgatagagtttctactacaataatcgaaagaatcgataccgtacgttatattggacaattatcggctaatgataagaatgttgtagatgtattgactaaagcaatcctagaggaagacttgtctttagataatactttttggggggtttcatttgaggctgcaaaagttctttcttcaatgctgccaactgagatcacttatgatgcgttaatgcattgttatacttcagtagataatcctaggacaaaggctgttcttgtggagggtctaaggaagtttgacaattctgaattaagtgaaatattccaaacaatcttagatgatgtgagacagagttactttgtgcaatctcaggcagccagaggatttggtaagatggcagatgataactctatatctatacttgaacaagtcctagaaaaggaccgtagttttaaaaatgtagtggcacaaggagcaattgtcggattaagaatatttgcaacaacaaggacccgaaatcaagatctaaaaactaaaattattaatttgcttattgacaagactagtactgaaaattatgaaaacgtcaggatttatgcaacatctgctttaggatttttcatatcagataggaatggaaatatagtcaatcctggatacgaacaaataataaaactgttaacagatacaaaatcagtccttgttcgaaattattcttgtgttgcactaggtagagctttccactacactaaaaatcagacagttattgatcaattaaagaatgtcgctgaacatgatcctgacggccaggttaggcagacagctctcgatagtatatcattaattaaaaaagacagggaagttattgcgaagataatgtttgcaaaagatgaaaagcagttcttagaagaaaagctgcaattgatggagacacgaataacacaaatttagtgatccagtagtaattagacgatattctcattatttgtctaaaactttgatattagatctttgactccatgagtatatggatctgttaattagataaattttaagtcaaacttgtcatcatatttctaaataacaaaattacaacaactccggtgggcttcgaatcgatgatgtatatgggaactgttaatttaataaataattaggtttaggttgttagcataatctggacctattatcattagtattacatcttgttaaattgaaaaaggtttcgaaattttagagcttaggtgattgaaatatatcctgacaaagtattaaatttattttgaaatatcgtaggaatttattatcattagtatttgttgctttatctaattattaatcatctatttcaaatagtatatattgcagaatattgtatgatatttgatgacaaccaaaataacgatgagtgtattcgttgtttcgctcataatctcatcaaccattatgtttaatacattttcgttacagtccgtaaatgcgcaacgtgtatgtgataatcaaataatgcaatctgcaggaaatgcccttcctgtaattcttattcatggatataaagaaccagccggtgtatgggcgctatgggagcataggcttgcagaggacaacatacctttttgtactgtaacttttgatttttctgatgataaatgcggttctgctatggcccatgctacagaattgggtgccataattgtggaagttaaaagagcaacaagttctgatcaagtaaacatagttgctcatagcaaaggaggcttagatgcaagagattatcttagttctactgattcatcggatgtcgcaaaccttataatgattggcacaccaaacggtggaggacctttagctgactttgtcatatcaattaacatattcaaccccgccctctattatccctcccagatcttatgcactcctgcgctgcttgacttggaaacaagtgctgatgtgttggatgtagcacaaaacccttatactgactactacaccatttatgggaattggcaaccgggtctaccatgtagagaaatgggttcagagggtgatggttatgattatttggccaggaatggtcatatacccaatgatggaattgttccagtttggagtagcgaagctcttggaaatcacatcaatcttggttccacaacccattgtcatacagaactattaaataatgaagaatataacctatctcgatctgtactttcgccttgatgaccgtgatccaattattttctttgatcagatgcttaagaatacgatgatatccattttatctctagttggaaaaattacaacgactccggtgggtttagtaatagatatattacgagtctgaaactccaaattagtaattctatatttgagggttattgatatgcgccgggtcggattaaggtcattttgatggtaatctacaggtcaaatacctgtaaagaaccattctaaattttatatattccttccaaatatagggaaaattacatgtgcggaacaattcaattcatattttatagattttgaaaaaggcaagccgatggcttgagttgttggaacaatttctacccctaatattttttgtaattctctaataggcttaaaaatgcaatctatttgtactactagaccaattttctccattaaattttgaaagtgtgaaatttgatcgacaggaatccaatcatccagagaacgacgaagtcccgtaataaccgagatataatgtgggatctgcagctcgcttctccggatcgtcacaagatcatgcaataaacccttccaagcccgtgatgtcttcaaatgctatacctatatcagagtaacttaagaaatattaatagttgcgatattgcgagcattgccaaaaattattttattaaaagagtctgtttttcccatgtgacgcagtgcatatgccaataaatgccagtattcttctacattattgtcaaactgcagacaatattgaaccgatattagagttttatggaattctcccaaggtgtatgaagttgcggctgcacaaaaagcactctcttcaaaaatatttttagtatttgatactattttatatatatattcaatctggtctcttggcaattttatcatgtagtttattattgaaaagtccaattgatcgagagaatttcgacgagtttttcttaatgttttaggcatgttagtaaggaagggaaaatttattgtaacattttttatggagagatttggagtttcaatacgaggtactcgtgattcaaaatccaagtccattcctaattgcgataggaagttgattcccatttgataggaactcaagtgagaaacgattttattccaagttcttcgtatatctcattaggcttaccaagtagttcattaacggccatgcgaggtaaaagatctgatataactgaacgtatatcataatcaatacatgaaggattttttatttcatcaagagggttataaactagtagccgtttaatgcagatctcatctcataagataggttacatagtttacgagggtctgtaggatttgaattacagaagtctctttcaagtttgcaggcaggagacaccaggctttccacacaaggatcgtatgcgccacgggaacatatcgtttgaccaacttgctcaaagcaaacatatgacggatcgttttccacaccgcctgggcacgtaggatatttggaagatgcttgctcggctatgcaattgtattgacgagtcactgggggtattggtttttgtaccgaacaactgtagcggtcagttggatgaccattacaccattctattttgttagcacaggcaaaagatttagggtcatccgtacatggatcggtaatccattcactagcacgggtgcatatcgtttgccccttagtatgtccattatcagccttatgacaataataattcggatcattttccacattagttccgcatgtaggccattcggaagatatctgctcggctatgcaagagtatggataaataaatggtgagtcagctgtggtagttgatgggtcatcagaaatgcactttggaccactaggagcattcgaccctgtctttccaccaaaccctaccatatgagatcgtgctggacaagttccatctggattcatgggtacttctgactctgttgttgtagatgttgttagtgttttatcgcattcgggactcgttggatcttgtctacaaaaaggcgttgtatagggtgctaatgttggtacagctggcactgcaggacattcagctaaagtagctgcttggcggccatctggacaatttacaagttctgttgttgaaggtgcagttgtacctgtagctggtgttgtagttgtagctggtgttgtagttgtagctggtgttgtagttgtagctggtgttgtagttgtagctggtgttgtcgtggatttgcaatcgggatcagtgggatcattagattggaggcaaatagcatcaaaaccaacactgaaacgcgaatcagcttccttttgagtttcctcaaatgtagttgagcttgtcgttgtttgtgatttacaaaatggagtttcaggagatttcgtacaaatatcattcttgacagatcctgaatcaccaggaatggaaccagatggtgatcctgttgttgtaccaggtgttgtagttgtaccaggtgttgttgattctttacaagcgggatcagtgggattagattggcaaggattagtatagaaataatctccccacagaacatttggtaattctgctgatggtcctggtcctggtgatggtgttatacttgtacctgtccctgtaccacattcttccgttgtagctgcctgactaccgttgggacaatttacaagttcgggttcagtttctggctcagtttcttgttctgatactccagattctgactctacttctggttgttcattttctgatgagctatcattcccatctgaactacctccatctgaactagcaaagatattagatgacattaccatgactgggtttgcagatagcattatggctaatgtcaaaactatagttaacctagccgcaacttttggattcatccctattactcctcactgttgcagtcacatgctaatttcacataagtgtatgcgataagtgcttttttactcacctttctattttctcttgtttttctaagatccacacccctttccataattgggaatgacttgtatacatttctgctgtaaagacacattatcataatgtatattggaatcaatatggtggcttctatataaccattttataatctgtattatcgatgttatcaaaaaattcaaaacctatacttctgtaatatatttaacagatcattggctactttattgttataccagtagtactacgcctaataatgggaataggctatatcattttacaaaatcggatctgaaattccatcctaacagaagtaacagtctaggcatagttgtaaaacttctaatctaatgcatattaagatatttagtaaccacttttagaaatgatttggtaaaataaacaaaaaggagttaggggttgtcgaaacagtatacgatcgcttgcacggacgtcacaataccagtcgtacttcgcgcctggattgtccaactattttcttcggtatcgcccttattgctcaaacttgtaagataaacgaaggctccaaggttagaaagaatttcgtattgacccccgcctgaaaccattgtgtcacagggatcacattttgcagtgctcgaagcatattgtggatttgctacttcattttgaggtccggtcctttgatatattttatggaacaacgattgaggtccctcgggacccagtggattttgtacctgttttagtttacaattctttaacttacaagtgaaataatcgtcaaaactttctgttctgtccttaatgtattacatcgttctctctatcagacttttcgccagagaggagtggatatggtgatcgacatttaagaatctgcagagttctggaaaatacgttccaccatctgttgatactggatgctttctatgaatctggaccaaacttgaaatagatcgctcagcaatgagcatatttctttcttttgatttattagctaaaaaagtgagagtatctttctacttttaagttcgatagatacacaaatccacatgtagaccgaaccaattttaacaaaggtttcatcgattataaacccagatattcttttcctatttctagcaattttcttgggtttatatttttgaatccctttccagattgcaacataactatcttgacaaattgagctagtgctttggatgtgttcctataagataaacctagaaagtataagtacaatccatagccaatgtactttgaaggtgttctctttcttttaatactcataacaaaaagagataggacatatttagctataagattttctttaagttaacagagccgtatatatagtataatagaaatttaggatttgttatttattgatcaatgatgatgactattataaaatactaggaattggctatggtgcatctagtgccgaaattaaaaatgctttcagaaatctaacaaaattataccatccggataaacattctaactcaaaacaatctcacaataaatatatgaaaattgtagatgcatttaatgttctttccaatagtgctaaaagagaagattatgataaaggattacaactttcaataattcaagaccatcttatttgcatactagtaatgagacctcaaattatcaggggtatgaaaaggcaggatatagtaacaataaaaaaactagatatactaaaaaggtaaataaaccaaaaacattcttagaatatagtttaatagatgccgatcttatctttatgatggataccgttgatatattcaagaatttgctttatcgttcagctaccgctataaagcttgatctgtttccatctttaggcgctattagatgtgataaaataggtctggtttattctagaaagtgtaaattgttcatgtttttagggttaaacgataatgatacctgttttgttttatacaaagataaagacgtttacaaactaccaaatatttataatattaatattgagaaaaatgtacccaaatatggatatatcagagaatagcaacagattattaaattctgtttatgaacaaatatatgatctgacttctgacccactacatttatacaaaacgagtgaattgtttaaaaaatgagtttgattatcagtgaataatacgtgaggaagattgaaggatatttaattcatttatggggaaaattttaataaatgggatccatctcattgtatttagcttctagctttgttatttccttgatttcttcttccttaatttcatctaatgcttccggttttaaaggatagctacattttgagcaatatttgttttcaaatgtattaatcaaaccgcatctgggacggtttgatatgaatggtttcttttttccaatttcttcagtgaaccgaaattatatacctttatgacttttaatataaattgataacttagatataaaattcacaaaaatattcttcttattaattataatatttaccgagatagcttcgattcttctatcttaactttttactacaaatttttttatagggaagtttctattgttgttctgtggttggctcatctaaggataattattttcacgatgagattccatttagaccgtcatcccaagatttaatttgtcagaattgttcaagaaagaataaggcgggatcacgtttttgcgataaatgcggaaataactttgtcccatcttgcaaaaattgtggtaactcaaaaaatttgcctaatgcctccttctgtaacaaatgcggagcaaaaattgatgaagggtcgcaaaacaaaaattatcaatttgtaaataatgatttcaaccgtcaaaacgataaaaaatcaattgattttagtgaatgtctgtcaataaaatatagtcttaaattcaactacccatcaagcttcaccaaaatagatcgcgttaaaaatgatctaaatattatttttgcctttcaacaaatagcaaagaaatctgatgttaaatatcatcctgagattacaatttcggttagaaatttggaagactctgtggcagattatcttagagaaatgggatacaatagagtaataccgcgacacaaactagatctttttgtcagtgatatcgatgtgtatgcagaattagggtcaagggaaataaggaatttatactgcgaatgcaaattcagggtttatgatcaagaattgacggactctgatcttgatcaacttatcgaaaagatcaaaattattgagaacaataaaaaaaaggggatgtcctcagaatactggctcgttactaatactagtaaaatcccgccacccgtaaaagacattgcaaaacagaacaagatcaaaatccatctcgcttcgatcaacaataactggagaagaagagctacttggagtgtacacaaaattgaaaagatagcctagattgcaaattcaagtattgctgattttactaaatggataaaccatatagtagttaacatggtattggactttccttttgaaacgagtattcactatgacttctaaaaatttttttaatactatttgcatatactgcatgaattagaagccactggttttgtttaataattggatcttactcataccttccattgatattataacacgagcttgaaaattaattttatagagattgggaactagttatcactataaaagatcctatattagatagattcgactattaaatttgtattttaaggtaaatatgatttaactgacccaggcaaaataaggtgctagttgaatataccttcctcgatcaattgctttgctatagtttgtttacccgattcatctacagaagaaatagatttaagcaaattttgtaaaataccgttcatagtttgatattttgcttctaattctttgactttttcatctttttcctccattttaccttttataatatagatacttgttttattttgttcttctaattctttgactttttcatccaaggaattttcatcttggtttacagttaaaaggggtattgccttttgatattctgacagaacatcctcttcctttggtctcagataatgttgaactataccggtatcatgcgacattaacattgaaacaatgagttctctcattactttctgacactctgtttcaaaaaacttccggaacccatgtacacttttaaaatcgtattttctgaaattaaattctccgtctttaggcgttcgtttctctcttaaaccttgtatcttccaagcatcattgattaatactctaattcctgtggcacttaattttttgggatgctttgcaagaccaagatagttaccatatctttgacttttaatttgccaaaggttacgaataatacaagaattcggaccgattctttcaccaaaagattctctaaaagccatccattcttttacagattcgtatgcctctggggtaacatatgaataataataattctttgttttagtattaaaaacttttaacttagcagctattagtttttcgtccttatatactggggtaaagtcaccccaaattaggtaactccatgaactaactcttattcccgatgatttcattaccaaaacgattggtttcactctacgatcagggtattgaatcaactttctgatttcttctatactcggtggtcgatcgttggaatatctaattcctttctttatcccttttgatattatcttccagttaacgctaatcctattcatttcacagaatcttttaattggtttgagatagttcttaattgtttccgtggatatttctccactttcaaccctctgattctgtaatgagaaaaatttgaataattcgttttcaatccatggtataccgtcttcttttgcttctaatttctcataaaacacattacaattctcttcgatagaactcgctctgatatctatgaaatcaagaaacctctgtaacctcttaggatattgacgttttgattctttggagttcagagcatacatgaatttttgatatggagttaaactaagcggacttttctgatttcctaaattatcggaagaagcaaaagataggctcattcttgttacatatgtattagtaacctgggtcttaaaaaagtaagagatatcaaacgggcccggtgggcttcgatcccatgacctgcggttccgaagaccgccgcgatatcctgactacgctacggaccctccttcttttcttttgatatgtattcccatggcagttatataatttattgtgatttaatcttgtagaattttcatgaatgtgaggaaatgttgggagatttacaatattattgttatctgtcatcttactgtttctggcaagatctatgcctcatttgaattattcttactgaatttggtaagatgacctgctttttgtccaatgagctgattcttactgattttagtaagatctagtaaatggggaaaaagagagttcagcaatggcgattctttattcaataatgtgacaatctttttgttcaaaattgatctcaatttatactcgtatgactttgaaacttgcttttgaccttgaagaaattgaatttcggatttggatagaagggacatatcaaatgcatatattatcagaaaagtataaagcttttttctacccacacaattagtcatttatgggtaaaattggaaatggctattcctggccagagtttatcacaggaccgaaaatgcaatggggacccgctctctgccctaacgtcaagttcaaatccctaaaaataatagacgagaacccgcgatccctctatctttagttattggtcatagagatagataatttgatcgatagtgttcacacaagacttcaccctctttatatactccgtcgagtgaaattggttatgaataatagtagacaggtaagaaaaggctatcttttcattgtagtattcatttctaccataattttctcaagtatgactatggtcaatggctttactaatgttacatatggtcaaacaaatactactcatcccattccaacaagcaatgttactataaacctggtaaacctacaggatatcccattacaaaaagtccgtgttggagatattgaaatggcatacaagatgtttggtaaaggtgaccccattatacttcataatggtattaatgatggcatgaatgcatgggacccttcttttctaaaaggtctttcatcaaatcacacagtaattatatttgatagtcgtggaataggaaatacaactgctggtagcgaaccatattctataaagttacttggtaatgatactgcgggtttaatggatgctttgaaaatacaggaagcaaatgttcttggatattctatgggttcatacataactcaacaatttgcaatcacacatcctgataaggttagcagtattacgctaattgctggaacttgtggtggaaaagatcatgtacctccatcagaggagtttatccaattacaagagggtattatgaataaatctctaaataatatacctctttctcaggatgaaatgaaatctcttgtaaatgcctcagaaggatcaggatggataaaactgcatcctgaatctcttgatgttccaaaaaacatgacattccaacaaatgaaacctggtctttcatctgaaacaatgaacaatcaatataaaggtgcaaaggcttgggtggcttccgactggaatggtgcttgtgacgaccttgcaaagatagacaaacccatgttggtcatagcaggtacagacgataatgaattagtgcctcatgaaaattctttagtcattgcaagtaaagttccaggagcatggcttgtacagataaaagacgctggtcatgctataatgattcaatatccagatgaagtcggtaagatattacaaacattcctatctactataaaacaataggtgaccaagcaggaaagaagcatttggttatctaattattttatcctagtacaacatagccaagcgggttcaaatcagtctcaaaagaagtgcgaggtgcgggatttgaatccgcgattcccttcgctttcttgttaagttcaaatcccgaaatacaggagagaaccaacgttccctcaaatgcaattataatcgagacactaattgactatcctgtactgttgattgtatttgatgatatcaaaactatgattttgagagaagtgatataaagaacataataagacaaaaagatatttcgaccactaatggcagtcatcttgatttatgatttcaatttggtcatcagcttaataataggctcatctagaatttaattacccagactaaccgtattacagtgtagcagtaaaattaacctgaaattttatattgtcatgatcgatagtagctctaataaatcaaaatttagtgataaattatatgatattaaatactaggtctggtttgacactcttttgcatggcattaactctaacaattggaatatcatcattaagttcaagcgcattctcacaaagtaatgcattcactccagatgtggatagcattaacaagattagggaacaatgtggtttaagcaaggtgcctgagagtactgatgtatctgatgtgttaaaatcgttctcacaaaataatgcttttgcttctgaagatgaaattatagatcagattagagagcaatgtggttttagtaaagtacctcaaggtgctggagtttctgatgtgttggagtcatttttaggtgacaatcccatacaagtaccaataggaacgccaatcgcactggtttttatagctgcagcacttctttttatcccctcggtgttatagcctctctatttttctttcaaaatttaattatacgaacctttccttcttgtccattttccaattgatttcaaaagctagttactaaatgttttaattcaacacgataaatgttatacaaccatgtccagattcttattccaacctgacccaatcgacggttacgattttaatccaattccaatagacatccatttagggataatcaaaatccccactgaagaaattcttgatgattttgggataaatacaactgagtccgtaattgtggggacggataagaacgaagttctaaacaggttgcaaacaacatttgcaagagaatttaaccgatatggtaaacttagggaatcagatatacggcccatggattataaaactaagcaagcctggactagaattagaaaacacatcaagaatgaacctaattaaggatattaacatatatctccaaaatccaaatcatgatcttttctaaataatataattgtctgatatctttaggagacaataaagggtatatctccagtctattttaatttctttatctccaatgccacataagaaatgtgccggttccatttttgtcgacatggtccttatagactcctactgaattactcaaagaggagagattacccgtagcaacatcatcaaaaatagcaattccgttactatcataaccaccacccacatgatagttggcaattgcataaaaggtataagttgctatatctttgttattagtaatatacttcgtgtttccttgcaaataagatgtgtcattatctctgaaggtttcagtcacgttcacatcagcagttatatctactgtgccgttaattattcccttacctgaaaagctttcggaagcattattatttgtcatattcagtttccctagctcagtttgataatgttcaacaaaaaatgggtttcccaaattaacatttttagagacgttgttgctatctagtgctttggcatattgcgcacccatgaagataatagatacaattacaaatcccaaaagcaatgatgaaacattattaaatgtgtgttgatatttcatgttaatcattttatccttttagattattaatatagcggtgtatttcaaatttgaagaacctcatgtatattattgtaaattaggagtaatttctatccaccatactgggtattagagatcattacaatgctgttacctcgattatcatctgtccgaatacgcttaatttcatgtgccgaattaatggatctaggctctccttctcggacttggtaaccggtttaacaactattgtcgtttcatttggctcgcttgagttatctaattcattggtaactattaattgaaagttaagtctgtttattcatttgtttgggctagcgattagttattccttgttactttcacattaacattgtctgatatctttatactctctttcatctttacgcttacgtgcttcttagccttagcgacttcattcccacatattgagcaacctactataccgttactaagtgtgataccatattttgtcttacatcgggggcagtgaacatcaggatagatatattctatgtctggcatatacctcatcatcatcaacctgagataataaccattcttctatctgttccttctgctattcggctatcatactgcatacatctccccaatacgcaacaaatctatcagcgaaggtgtaagcctgagcggctagtgtatccatgtctcagttgttatatgtctatgctttcgttattatccatatccttacaagtccccaatataattacagaaggaagatatagacttagtttagaagcatagcagcttggacaaggataagaaaacatatcaagaagttaacctgattgacataaaacattagaacattccctataaaatatcttttgtttttctgaacagacaattgtaaaaaaccttaagagaagaaagaagttttcaacatagtgtttcaattttatgttctaatgttctaataaatatataattatatatattataaatttattatataaagttaataattaatatccttgatgtagcgatataagtcaaaaaattgcctagaccgcaccgattttcgcaatatcctttagaacaacttaaaatgttctactatgttctgggctttcagtcacctacatccgcattagaggaacgagccaagagctctagccctggaataatagcggttgaagggttcactgtcctacctggtggcctccccattaaagcaggcaatgaactcgttggcgggtttggtgtaagtggagctccaagcggtaaaatcgatgaggaatgtgccactgcaggacttgcaacaatagcctcaagtttatctaattcagacacaagcagtctcagcaatccaacaaacaacacatatgttaccaatgataatttaaacttgaatagtaatgttacaggcaataacttgacttccataaagtctagcccttggtcaacaactaggtaacagagtggatatagtataaacggatcgaaaccatctatacattttttgtccacaccgatttaaaatgataatttgtcagatccgttatgaaacaatgtaacatatgaactattgatcctaacgtaaataccaatacctagtaagcgaataagttcttcacagtagttatcgattcttacgactcaatactcacatataataccaagagattttatttaagaaatattggaataaatccgagtctttcgttattgaatttaactactgcattaaattagagaacataaaaagtggcaattaattgcactaatgcttctatcacgataactcattatcaagtaaaaattaccatttatttattgccaattatttgcaaaactcgaatcttatggttagggaactaacactccccgcctgaaacatgaccattattttcaatgtctgaatgtattcatttaatgtctgaatggatatagttttgagtcgttcataagactttagaccacactctgttttattgcaaaatcaacttagtttattttccaattcatccaacactggtcttatcttttttctgattatttcgctaatatctagttccaagtaacaattattatcttcatgctatattatctatatttggaatcttcaactctgtttctaatagttgtatacaataaagtattttaggagaagaccggaatatagcttgattgttgattgtctatatataatttgaaattaatctcaactggaattgtattactagtatctttaaacattttaccttcttctatttcccaattagccttttctttgtctgtacctacagaaccatattggactacagggacgtctatgccaacggcaaggtctgaaattgttggggctgtattaaatgataaaatatacattcttggtgggtttgataacgaggaccgcagtacttctatcgtggaggtgtatgaccctgtaactggcaattggactcgatcgactccattgccccaaccactagaccatgccgctgcagcatcttttaatgggaaactctatgtggttggaggaggctatcttaacagagatatattatctgataaactgtacatatacgattcgagtacaaataattggactgaaggagcaagtcttccaactccccgtggggcattaactgccaattttatcaatggggtgctatatgtgaccggaggtgtggattatgaaaacacattgacgagtactttagtatacactccttctctagatcagtggacggaaaaagcacctatgccaacggccagagaacacttaacctcagcagtcattaatgatagactatacgttatgggtggaagaaccaatggaatggcttccaacgttgatgctaatgaggtatatgatccagtaactgataagtggactacgctggaaccaatgccttcaaaaagaggtggcttatcttctgctgcaatagccgcaaatgagtcaatctatgtctttggaggagaacaaccaacgggcacatttaacaataatgaaaagtttgatgtggtatctgatgcatggacctctgagatgagtatgccaacggcacgtcatggtttggttgcagttgcgattgacaacatgatctatgtaattggtggtggaccacaaccagggggttcatcaattggcttgaatgagatattcaatcctggtaaaggatagctgtggatatccctataacttcgcctccaccatcaatttaagcattcgctgcttctggccccattgcatggagccacattcaaaggctggatattcacgtttaatttgattcctatggaagtattaatggggcaaaatgttttaatttgactccatattaacaaatgtaatgaatctatcaaacaacactttgatgattgtaatggtgccgactatttttatcctccttgcaaccgcattcgcaggaccgctttctggcgtagcagtagctcaaatagtaactggaactccaggtgaagtaggaactaaaaataattctgaggattattatgctccagtgaacgaaaccggccccgagacgattcaaacacttgaaggtattgagggcagcaatgcagcaatttttggaaatgataccaacataagcaatccaaacattaccgcagctgacgctggaacagtaaacagtcaagaggaatgtctgcgattatcgaatcagtccgccgttgattgtccataatttccttttttttactcattttcgaattatttaataatcttattctaaatcagaaaaaaacagtgctccccctttttcggtatcttataaacaaataactatggtaatataattaatcaatcttatttgactgcagctgacctttaaattccctctagtgtcgcgcacatttatcataatcatgtattttcagcattattcatggagtttctttaatatagtccaaaggggttgtctatccctaattttgctccctccgtccacttcagaagaaacaacttttacatcgatatcatcaaagaaccgattcaaatacgcctcttgttcaatcgctaggggggttgtgaacaataatttttttctacccatatatgatacacatcaatgtaaaatctggcaatttctaatctattttgtaaacagtcaatggcattaagtttgaattataccatatctaaatagtagcaaagctttgtaatttgctcattgaacattctattactaaatatacggccgctaaatgttggacatagttatataaaaaagataatatctattaaaaacggttaatatatctaaaaatatgtaaattttccataaaggaataaaatatattataaactttttatgcaagtatgattttatttagtaattatgcagaaaactaaaactataacattcgatccattcaaaaacggaatagacagttttgtggttcagctttatacaatgtgcacgtcatatccaaataaagaaatttggagtttagatgaaatttatgaagcccggtatccaaattccactcaagacaagtcaaaaacaatgacaattctaaaaaataacttaaaatggctaaaatcaaaggatgctgtagagtttccaaacaataattccgttaaactagtaaaatatagattaagcagtctgattgacggggtctgaaatgtgaataatattttttatttcttgaattgatatttaattaatattttggagtaaattacacttgcgacagtaatggcaacaatagaaagggagatacaaataagaagatataccactaaccttgctaacccctatatgtttcttagtcattcttagatggtataactattacttttaatcgcgtgctatagatctagcaagtatctcataaaagaaaacgatatctaaaaatacttcaaaataaatcagagtatgattccaatattatgtatattaaatctcatgttattggaatttacttgattattgtcggttgcgagtttacagtttttattaatacggcttttccttatggaaatctcaatgaattttactgtatctacaacaaaaaaattttacaaatgttcaaaataatactaactaatctttatggtataatttaagaccaacggtaagggttggatataccattaagcaaatcaaaatagagtggtgtatttctcttatcctatctgtcaaatatagacataatatttagtaacaagttatcaaccatcacttgtatgttatccctgtactctttcttcatatccattttttcgttcggatttttttaacagcggtactatttgataatcatcaaaattattcattctcttgataatttcgatcataaattcatgtggaactatatcagaaccttaaaggataatgtcctattttatcttcaatatctcgatcccttctgataactgattttctttattggcttctatagctgatttaatgcattctgaacagctttcattaccataacacattgggagcctttaattcagctaggcgtcctttaggagcagtgagatcttctaaatcaaattatgatttcactcgatctgtttcgttggttatgcacaaatactaattaattaatgcgataagaatgagtttttagaaatgaagtggactcaaactgatgactataaagaataaaattccataatgaagataaagtcgttaattgtgatctggttatccggttgtcacttctgaccaaggctcttctggtccaaattaaattagaaacccttttctattatctgcaattactgtcttatccaataaaatagttgataaattatgaaatggaaaagtatcatatttcaaaattgaactcaattgaatgtttatataattacgaatcgttatcaatattgtgatattatagataatgaatatcattgaaaatgaaataccatacctggtagaagcaagaacttgcgggtgtaatgaaagggggaaaagtgtttcatatcgtttcattgaatcttctcatgccttgtgtatggacaaagtagaattgatctctggtcagatccaagcctgtgaaaggttattgaaattagccaaggaagatggtgagattgctttactaagagatgaaatatctaaattgaaattggctttagaaataatacaacataagtagttggtagtttaaatgatgattctaaaaagaaatttctgcttgatttcctttttttatatgaccttctctaaatctcactcaaacaatacaggctgaaccttcttagatgatcttatcatttagaatttcttgtattttactttaattatgtatcctgaggtttattatgattcacttttgtcaattgcatatttgtgttaattatgaccatatggacatactttaaagtgattatttataaaaatataattaaaatagttctaatttatatgtttgaaaagcatatctttatcatgactgacatcagatgcacgattattccagaaccacatcgcgatcgaaaagcggtatttagacaatccactctaaagactccttacatcgatggagatgactatgaagacgtccaatctataaagatgtcttatctctgtggtaattgtgactttattcttgcaaaaaatattcactcagatcagattgcccaactcttaagtacaaatagtaaaggattagatatcgtactacagtgtccagaatgtaaaaaattcaatgaattgaattcagatatgcatccttcttaagttgtttatcttactatctatgtcaagaaaatttgagtattaaatgaattcactcaagacgtcaatcaatttcaatgcttattattgaattagtttcccctcctctacagcggaatatcttgatgagcctgcaggatatagcttgattatatgctactcgaagactgggaaataataagtatctggcattagggaaataggcgctgttaacttaggcgtctggcacctccttgttgtgtatttttacaaatagattcaaccagtttttgacatggtctagtttacacttctctttactacatggaaagtaatcgtcaaatccttcagttcgatccttgatgtactgcatagttctttcaatcagacttttctcaaacgaagaattgatatggtgttttagttttaggaatctacaagccattgggtaccaggttccaccgtctgttgatacgacatgttttccgtgaatcttgatcagacctgaaataaatctctctgcgataagcatgttcctctccttggatttattagctaagaaagagtgcgagaatttgcctattttctggttcgattgctgcccataaccaggagtattctgagccgacttttattaatgtctcatcaatgaggtattctgatatttttgttcttcttgttgaaacctttcgaggtttatacctttgaatccaattccaaattgcaacgtgacttctattgataatatgtaaaaaggacaatgccttggcagtatttctaagcgataagccaagaaagtacaaatacagaccatagtaaatatgctctgaagatgttttatttcttttacttaacataacagaaatagagcgtctttaagctaaagatttatcgttaagttaacagggccgggaaataggcagtcttatttaaataaaagtaattacattttatgtagaaaaacatagatacctttaataccttttctgattaagattggttggaaaggaaagataaaacaagattgtctggaaagtcccaactaattgataacgatcataccatgtctacacttgactttggcaccatggagtttatgaaatggctaatggaggtagaaacaggttcaaaagaatgtctaataatagtgaaagattttttcgaaaacaaatatgtgattttgtttgataagaatatttctagttcggttatagtttgttacagagaaagcatgccttggtgtattacttgtgatactgatgactgtggccatgtaggattcgcaatatgccttaaacagcactatgatagaaacgatcaaattatttgctgattaagttgtatatttaaggagcatcttttttgattcccgtgtccgatgatggcgattcattaccattgtctcgatcttttctatatctctcagtaaatttccacccgtatttaataacatagggtgaaatgaacgtggtgattatcgtcatagttcctatcattggtaatatgaaggaacttgcagcgccaacatctattccaccttttgctactactaatgcgatttctcctcctgatgaagacaatcctacagcagtacgggttgaagatagcttactcacgccttgtattctagaggaaaggtagactgttaagaattttgcacctattgaaacccctattaggattagtgctgggattataaacattggaataagtttaaagtccatcaacgctccaacagagacaaaaaataatgcagcaaaaatgtctttaacgggtgtagctaaaacactagttacagcatgcgaccttgattctgcaatcagtacgcctgcaaagaatgctccagctgctactgatattcccaactgaaaagatatgaacgcaaatccaaaagcaacgccgacggctgcgacgattaatacatcatgttgattggtccttgcaacaacatcaattaattttggaactatttttgatcctactataagtactcctgcaataaatccaatagtgattgctattgatgtcatgacttcattgacagaaatatctccactcactccagcagattggaatatagctaacaaagagataatgagaatatcctctatgatggcggtgcctagtatcaaagtggcggcttcatctttcatcatgttaagttctcctaaaaccctcatcacgatgactgtacttgttactgatatcgctaatgctatgaacaaactatcatagaatccgagtcccagtgcctgtgcggtaaagaatcctatagctaatgttccgaaggcttcgctggtagcgatgataatggcttttctgcctattcttcttagttttcgtatggggaattccatgcccactgtaaagagtaacaaaattacacccatttcagcaaataaattaaggacatctgaattatggataagactaaaaggtggagtataaggaccgatgataatacctgcaacaataaaaccaataactacaggttgttttagtctgtaaaaaatcaaagtcattacagaggcaattatcattataactgcaaaatcttgtaaaatttgttcaatcggtatttccacaacagaatttgtggtttacgttatttaaataatcacgctaggtccatatttggccaatttaattattttagtttttcaatgtattactacatttttaccaaacagttgatttcatcttcttgtctttttcaaatcaagaaaatcttaaactgggtagttatcccctcctagaaccatgtcaaaatgtaaaaaataccttgcacctatggcatggcatactgaattaatacgaaaagatactatatggatcctttaatcgtagattaacaacagcattgtagctcatcctcttcctcttctcatgtttgaccaattttttaacttttgactctaccattaatttctaaaactttcctaagagaaaaaattgaatttatgatgcaaccatttttttgctatgaaaccagtatcactaaacgaaattgtttgggtcttaataacttgatagttatttcctattccagattggccgccaaattatacaatctcttatctataaaatccttggttatcattgtgggtgattctatctttaaatcccgtggtagaattttgtttatcttaataaataatttaattttatcgtttgtattttcctcgtaaatacatttcatgatcatacgtttaaccgtatttacattaatcatattatactaatgataacaatgtttatattcatatctattaccttggatttagatatccattttaattctttaaatttagttctgcttataaataatcaaattggatgtggttgattgttcttctttagatgaaattaggaaaaatattgattcaatagacatggaaatagtttcattattagtcagacgaggtaaatatgtacagcaagccgcgagattcaagagtgattatcgcaacatagaggacaaaaaaagggtggatgacattattgataaagttacaaactattcacgagaattggattttgatcctactgtgatagaaaaaatatactcttttctgattgaggtttatattcaatttgaaaagaaaaagtttctgaatccttagcagtcatccattctattctttgacgtaaatcttgtccattccgttcaacttcatatgtcagagaattttccttaatgcttcaaaaggtgctttcatacattaaaattactgttatccttttgctaaattttctttgccaagtgaagaaaacaatgcattaattatgatgattacctatttggatgcctgattaaatctggcctactctgacccttcatttaactatactaatcagaaaactgaattatgaaacttataattaattttaataaaatacaaatattaattcagtcaaagataatattggaactagatcgtttatgaaagtatcagataggattagtcgagttgaatatgcaattcgagatgttatgttacatgctagagaatatcaaaaaactggaaaagaaattatgtatttaaacataggtgatcctgtggcttttgattttaagactcctttgcatattaagaatgccctagtagatgcacttgctagtgataatgactattatactgattctgaggggtggaatgaacttagacgatctatagtggggaaggaaaaagggaaaaaaggtctggatttgacccctgaggatgttttggttacaaatggagtatctgagggattggatatggttatgggttccattgttgaagatggcgaccaggttttgttgcctgggccttattaccctccatattcttcttatgcaaaattttatggtggcagcataactgagtttgagatacatgaggacggtacacctaatctggatgatataaaaaataaaatttcatcaagatcaaaagctatctgtatcataaatcctaataaccctactggtgaggttttcagccataaaagtctaaaatccttaatagatatagctgccgaaaataacttgtatatcatttgtgatgaaatttacgatgaaattgtttttgatgaagaatttagggggattgggagtgtttcaagagacgccccagttatactactcaatggattttccaaaacttatttgatgactggattacgatgtggatatgtatgcatgaataacaattccagacaactcgatccattaaggcaaaatatttttaaacttgcacgtgttagaatcgcatccaactttccagttcaaattgctgcaaatgccgctttacacgggtcacaggaacatttgcccattatggtacaaaaattaaagaaaaggagagatttggtatacaaaagacttaatgagatcgacgatttagaatgcaccaaaccaaaaggtgccttctatatgttcccgaaaatagaattgaacaatagatggaaaaatgatttagaatttgtaattgatttgctaaattccactggcgttttaacagtccatgggtcgggatttggaagctcaggaactggccattttagaattgtatatctaccacaagaggaaatattggaaaaatctatggataaaatacaaacatttatcacaaaaaaaccggtatgatgtagttgtcgtttgtgccgttaatgaatttgtatttcaattcatagaaatttatcctgtctctttctcctcccaaagtaaacaaggactagacctatagcgtacattgctaccgtaaatttttcattagttatttcagaattgaaaaaattatcaacaaaaaattctggtcctaattctgttgatatgagaataagatttcttattaatatgatggttgccattactatgaacagtatcccaagcggaaacatccattctttacgtctatctcttattctcttatctatcttatcaaagtccattttatgctctattatgaaaaattaatgtttataccagctttatccctggatgttttatcttattctgcttcgaagcattaagtaacattggagtcatgacttctgcttgataagataacgaaagtgggcccaaataaatagacctaagaccatttatttctgacactagatccgagacctttgctagggattctttgttatccgtgcaaataaaagtgtcggcatcaagtgtggcttctatatctttaagttttatttcagagattgtatgaaaagctgaaactattttattacattttggtaaattttcggcaaccaaagtcccagccgatttttttccttcttgaaagggaatgtaataaaatccatcctgattcctacccataggaactatcggtgatactacgatacaattgtcatcaataatgtttgctatttccatacatgtactttggatattttcataaggaatggaaagtattagtatgtcgctctcttttgctacggagaggttatcgctgcctctgatagttcctttgattttatcaacatgtttgctattttttatatttttcatatgattttccgaaatagtttgagctttttgtttatctcgtgagcccagtatgatttcatggttagcacaccatcttaaggcaaatccttcgcccataccaccagttcctccaatgattccaactttcatattaatgtgttagatatcaagttctaatatattaaagcacgtttggagaagatatcgatgggttcgatctctgggattaatcatatactatatttagatgtctttttcttagaatgtggaagaaatttagtctgtgaaaaaacccagagtcgagcatcttgtatctgattctagcattatttgtctatatttatccatcctctattcgatcatcttgttattagattaatatacattcaatcattctattattatatcaatttgaattctaaattgaccgatttgtatatttaactttccttaacacgaaatcctatatctcgtcctttgatatgtgtcattaaagaatatatccgaagaatcttctaaagaaatgattactcacgtcacacaattacaattgttgaattatttatgaatagtttaatattgaaataatttttaatatattttaagtaaattatgtcacttattattttcatgaggcatggtcaagcctataacaatgtcaaaagactgttagttggaagaaaccttgaatctcatttgaccgaattaggtcgaaaacaggtaaaacaaagcagcgaattattaaagacaattccaattcacaaaatttattctagtcccgtaatcaggactagagaaactgcagaaattgcatcagatgcactaggactggattacgaattagatgaacgattatttgaaatcgaactgggaaaattagttgggctttattatgatgatgttttatccactcatggtgatttgtttgcaaaattttattcagataacgatgacgaaaattcattactcgaatttgaagtggaatcctttggttctgtaagggaaaggattcgaaatttattacaggaattcgtcgaaaagcatgtaaaagaaaatatactcttgatttctcatctggatccaatcaaagctgcgatttcacttgctatgaatataaagccttcatctgtatatagcgttcaagtccctaatgcctctattaatgtattaaagaattatcaaaataatctaacattgtgtggtcttaatatcttaaatatggaacggtttctcactgaattttgatacttttatttaaggttaattgattttattttcattttattttctcttgccatttttttgatcgtgtgattgacatttatcaaattgatatagcaaaaaccttaaatggcagaaagattcaccaatccaaagagagtggagattaaggtatggctttttcctctgttaacaagatattgttgattttcatatttagttctatggctgtaataggtatacaaagtatactgcaaatagtacatgctgctgagggtggtgagactgtgatccgtagagttgaaatctggggtctattttatagaatgatggttgcagcttttattgttggggctgtagttcagggtttgaatgtttatatttcttggaggtttagggagtctaatccccgtttcaagaatatcgataaagctggaggtaaaatttagtggggcacagtactccggaatgggtgtatataggcgccgtcactgcgatccttatttgggtgggggcggaatcttggaatattgaacataccttggagtatgctccgcctaactcagaaacagtacgagtagtaggtcagcaatggttttggtcgtttgaacatgctgatggcactcaagaaataaacgaacttcacgtaaaggaggggataccctacaggttcgagatagtttcaaatgatgtcgttcatagttttagcgtccctgattttgctatgctcatggatgctgttccggggagagttaatacaatgtggaatgtattcgacgaaacaggcgaatacctgattgaatgtagggaatattgtggtatgcttcatcaagatatgagggcaagattatttgttgaacccaatactgaaaatgctactgctattacaagtgaatcggaaccgacaatatctcaaggcactggaactgctactgtaattgcaccaggtggaggcgaagtagggactactggaagtggaacaatgagagtagttgaaccaggcaatatgacccaaacagctgcaaacgattctacggctgccactaatgcaacaagtagcaacggcacttcctccgaaaatgcttcctcaacagctgcagcctctggtccagcattgtctatccctgcaggtgctgcaactgccggaaatccatcttatgctccagacatactaacagttaagaaaggagatgtaattaccgtaaccaatgatgatactgcaccgcatactgtaaccaatggagctagtcctggcgatgctgatgctggaaaattgtttgataccagcattatgatgcctgcagcaacagcccaaatagataccgccaccttagaagcaggagatcatccattccattgtactgtgcatccctttatgaccggaacactcacggtacaataaatattttttatcttgtagcttttttaagaacaattagatatagatcttacaataaaaatgataattattttagatatttctggttattgagacttttttatatattttagaatattttgtaacaaagggggatccaaatgcttttatagactcgttccaattttattggatataggggtgttattgtaagaaaatggttctagaattaaaaaaacctcgacccatatgggagatcatattttctacccatcatactgatatcgggttattgtatattatagcctcaatgacggcactatttgctggaggggctctagctatggcgatcagggccgaattatttttgcctggtatacaaatattctctggccaagcagatttttcaagatttttcacggtccatggaacaactttattgtttttatggctgatcccatttgcttctggggttggtaattatctaattccaattatggttagatacaaagatatggcatggccaaaacttaatgctgttgcattttggatgattccaccgtgtatgttcttggtttggggaggattttccgatactacttggaatgcttatccaccatattctatattaaaagctccaggtccagcagcggatatgtggatagttgggttaaagttgctgggattgtcttctgtactaggtgctattaatttcactgttactatattaaaaatgaagcatcccgacctaccgctgatgaagatgtcattgtttagttgggcaaccttggcgacttcactaatgattattgtagcaattcctacatttgcggcatcactggtaatgctctatacagacaggttgggagtaactggattctttaatcctgaaatgggtggagatcctatagcgtaccaacatttgttctggttcacattccatccggaagtctacatatttgtgcttcctgcgattggtatgatgtatgaggtaattcctaccttctcaaggaaacctctatttagctactattctggtgttgtggcgctaatagttatatcgattataggttttggttcatgggcgcaccacatgttcgcagtcggtatgagttttaccgaaaagactgttttcatggtggggactttggctgcagtaccatcatcagctatgcacgtctttaacttcttggctactatgtggggcgggagaattaaatttgccgcgcctatgctgttttcagtaggagccatattgctattcttctctgcgggagctggaggtgtagtaaataccgcaatgccgctagactttttgactcacgatagctattgggttgtcgggcatttccacttgttcgtaatgggaaccatatcgttggcgttcactggtttcatctactatctgttcccgttgataacaggtagaatgtatgatactagattggcgaaaatacatttcgtaatgacgtttgtcggaattgctgtaatatttggtatacaacatattctaggattatatggattgcctagaagagttgttgactacctgccaatacctgagctaattattatgaaccaaatagctagtttcggaggttgggcaataggcgcatcttatgccctgttcttgtacaacatgataaagtccgcaatgtttggcaaacccgctaatccaaaggatccattcgagttaggtaccggagttgaatactactatgactacgcacgacgagaaccacatcactagaactacgccaaagcgttttatgaaggggttgataataattgtcatccccctcatttttctggggtttattactattgtgtattggaatgaaactgctagcattcctccacctgtctctgctccaccacctgctccaccacctgcccccgttaacgctccaggagccgcgtctgaaacaacaagtagcggtgctaccactacaaccgcgccaaatgctgctgcacccgcttcagcaggtccttcaatctcaattccagcaggcgctgcaactcctggaaatccggcttacgctccagacactctgacagttaaaagaggcgatgtgatcacagtaacaaacgacgatactgcgccgcacactgcaacaagtggctcgggacctgaggatcccaactctgcacaactatttgatacaagtattatcatggccggtgacacagcacaaataaacacagatagtttggaaccagcggactataactatcattgtactgtacatccctttatgaagggaacaattacagtacaataattttttttaatgtcaaaatattagatagactaaaaaataatgccatgaattacgataagtttcttcaggttttttcaattggtaccttatgcgtattgtttggattaatgaccctgggtggatatgttagttctacaggtgtaggcttatcttgtccacagtggcccttatgtccacagggattgatcccttcatatgagtttttgatagaatatatccatagaacgactgctgcaactactggactcttggtgtttttaaccatgatttttgtccttaggggaaaacattcgctcaaatccaccaagatgttttcaatcatagcagcagctgccgttgtgggccaaataacattgggggcaattgttatcaatgaaaaattacatgcagatttagtaactgcccacttgggtttgggcttggtcttgtatagtagtatgatatatgttgtgataaacatattctatacaaatctcaatctaaaatccgcactgaatccgtctaagcagtctagacgtgataatagtaatactcctcaagtaagttcaccgacttagcaatagataaatagtaactgtgatgccgtcgttttctataaaaaacttgaacaaagaaaaaaaaaccatttcggtccaagacctcaaaccattttttataatggtttttttggcattttctatatattcctcgattccaattcccttttttgctgcaaatgctcatatcgatcgttttgcttcatataatagctctggaatgggaataggcgacaaatattatgtaatacaacagttggaacctgaatatgtaaaaccaaatgaaccatcaaaagttatgtttagtattcaagacaaacacggtaaggacgttcacgatgttacaatcatggttgaaatatattctataaatggagaacgtgtgttagtgttcccttggactacacttgaaactggagattttgatatcccatttgtatttacaaaaaatggtaattatcaaattgtattgagtatactaaatgaagacgtggcaaatagcaaaatacttgatacagttcctccaccacgaactatcctgaataatagtgtaaactgtaattgtgaaagagctgtatttaatgtatctataaccgagacttttggactgatttctgctcttaccatatatggtgcaatttttggggttatcattgtgttgggaatcgtattaatctggatatttgtcagtagaagaaagaacaaatccaagactgtctaacgatgaattcataaaatgattggtgcttttttggatatgagtgcaagaacaattttgcagtatatcatattcatgcggcgttggagggggaggagagaatgagagggagtacaatatgttccccacttttgcacatggtattcaaatctttagggaattaactgtatcttttattcttttctgacgataaattgattattaaacaacggattaatcttcaaaaggatattaaaaagaaaattactaattatgaaccaatcttcatagatggatttctttttctcatctgtttgcatttatgcactgttactcttccattaactttgtctcccgatccattatcctgaaaatgtaaatttggattggagttatagctaaatcattggaagtaataaaattagttagcaaggtctatttgatgcgagtgaaaagaaaaaatctaggaagagtatcaagaaattcacctaaaatacaaggtgatgtaactttcatttcaaatcgtctagaatttgtatacctctttttaatttatggtggcgatatcagaaaatagtggtaaattatatttgttatggaattaatatatataatttaatattaatcatcatttcgttttagttgtatttatattgatgtttccttttttactgactatgaataaattaaagaaaatctctttaatttttatatcaagtacttttgttatagcgttattggcattagtaactctaaatgtcttatttatagtgagtggagttgctagttttgtgatggctttatattatctttacatacagagggctagacaatcatttaagaaagattttttggatgcaatgaaataacctttcaattctctcccctattgttggtatctttattgatgttgtttgtctgtttacaactagaaacaaagtaatctactttatttttttcagattcgagttttagctgtggacatgacatcgtctattgtattaacagtcatctcatagtcatctggagtgtaagaccatttgacctttaaacaataaaaattatcttatttacttgttgaccccttaccctgatcaaattatctattctctatttatctcagaaggtccataaccttaaaggaaatatacattcattgttataacaaatgtgcaggaaagtgatttgtctcgtacatatgttgttgaagttaagtttgatcccagtggtcaattcgtggtcaatgaggcaacaatggagatcagagtttcattacgatgtgtccccgttaaagggaaggcgaacagggaactaataaataccatttcaaaacattttgacataaaaccttcaaatattaagataattcatggattatattgtaaaactaaagtgattcagatcgtctgatttttatactcttgtactaatgttgtttgatttggtatgtaatgggagatcaaactatattttgtgactgtatttgttaaataaagctcgttagtagaataactacatatccatctataatacaactgttctcaaacaaatagcatttgtcagtgtatatagagagtattatagtttgttactcaatttgtctttccaataatctttggattattttttcacctattactgctgatgctaattcttgtccttctttggtttgagctgcaatatgtggagtgcacactatattattgagttctagtaactccttgtttgtaggaggttcaacttcataaacgtctagagctgctccgcctattcttctattttttaaacagtctacaagtgcctcttcatctatgacttcccctcttgaagtgttgatcaagaatgcactatttttcattcttgacaatatttctttgttaatgaggtgctttgttagatcagtatatggaacatgacaagttataaaatccgaactttccaccaacgttttaagatctgctgtaataagtgaaacttcttgaacaaagctcttatcaatgggaacaacatcatatcctatcaggttcattcttaatccccttgctaatctggccacatttcttccgatcttgcctaatccaatgattcctaaatatttaccttttaattccactccaattagatctttcttaatccatttaccattcttagtagcattattggcagcgggtatattcctgcttaatgagaacataaggcctaataccaactcagaaactgcatttactgaagcttcccctgcgttaattacctcgatattgttattttgagcttcacttgtgtctatgttgtccagacctactcctactcttgctattatttttgccctctttgcattttgtattacttcctttgttatcttagtcctactacgtacaacgattacatcatagtctttcactttggatattaattcctgatttgctatctcaggtaaataatcaacagtgagtccagccttttttaaaatctcaattcccttttcgtcaatggaatcacatactattacactgccatcaatttgcatatttgaaaacttttttatgggaatatattgattacttttttaatttaaggaaaatgtttccaacgttaggtagacctaactgattcgacagaaccatcaacatacttatgtttttctttggtcaatagttgtattaataataaaaatacttataatacataacgccgttattaacagcatgaccgcaaaagaactagatatggattacagtaaatatgattttaaagattcaacccaactttatgtatatttaagtaaaaagggcctttctagaggtacagtagaagaaataagcaaaatgaaaggggagcctgattggatgcgtgattttagattaaggtcatatgatgtttttatgagtaaacccatgccaaactgggggggagacttgtctcacatagattttcagaatatttattattacgctaaagctgctgaaaaacaaagtaaaaattgggaagatgttccagaatcagttagaaatacctttgaaaagttaggtataccggaagcagagagaaaattcttagctggtgtaggggcacaatatgaatcagaaacagtttatcatcatttgcgtgaagatcttgagcaacagggtgtgatattcctagatactgatacagcagttaaaaaatttcctgatttattaagaaagcattttggaaaagttattccaccagaagataataaatttgcagcactaaatagtgcagtatggtcaggtggttcatttatttatattcctccaaatgtaaaagtagatttaccattacaagcatatttcagaattaatgccgaaaatattggacaatttgaaagaactttgattattgctgatgagggtgccgatgttcattatattgaaggatgtactgctcctgtctattctaccgagtctttacattctgctgtagtcgaattgattgcaaaaagaggagcacgaattagatatactactattcaaaattggagcaaggatgtatacaacttggttacaaagagagcatacgcttatgaaaatgcatctgttgagtggatagatggtaatctaggcagcaaactcacgatgaagtatcctggggtttacatgttaggtaagaatgctcatgctgaaatagtgtctgtggcttttgcaggaaagggtcaacaccaagatgctggtgcaaaagtggtccatcttgcacccaataccacttctcgaattacgagtaaatctgtgagtaaggataccggaagaaccacttatagaggattattgcatgtggcaaaaggagcacatggagtaaaatcaaatgttcgatgtgatgcattattacttgatgaattttcaaggactgatacatatccgtatgttgaagttaatgaagatgatgcaaccattactcatgaggcaaccgtgggaaaaataggtgatgagcaaatattttatttaatgagtagaggctattccgaatctgatgccttgagtatgattataggtggatttatggaaccatttaccaaagaactcccaatggaatatgctgtagaactaaatagaatggtaaaaatggagatggaaggttcagtaggttaatggtaagtttagcttcatctttagtcattttattttttcataaagattgattcataatgattccattatcattgctttcagaaaataatttacatgaaatactgtccactaatgaaagtgaacccaattggatgatgtcttctagaaaggagattttatccaaattttctggcttgcctaatgaagtttcacctttatattctaaatactctggattaactcttttagaaccaaacaaagtttatttttctaacgagaccacgaattctatttcaaaagaccttaaaatgcgactacaggaaataaagtcttctccaagcatacttttaataggttcctctgttgcacatatttttgttccagaggaattatctaaaaaaggtttaattatttcgacaattcaagatgccataaagaacaattcagaactagtgaaaaagtactttctagataaaaccaacaattatgcagatgatcgttttctcgcattaagttcttctgcctttcagtctggtttctttatttacatcccaagaaatttgatgattgaggggccgattaggattgtatattctctaaaagacgatcgtacatcatcaatttgtagaaatatcgttattgctgatgaaggctccaaaggaacaatagtacaggaattgtactcatcatttcctacatttgcttcatcatattcatcgtcaaaccataaaatatcaaatacaaaaaatgaaactcaagaaaatgattcaaaagataaacgacaagaatgctattttgaggttcttgaatgtattgtcaaacccgctgcggaacttgagttcattactttgcaagctatgaattctgaaactgtttgtgttgctaatagaaaggcctatgtcgaaaaagacgctaagatgtcctggtattctggaatgtttggtgcacgcctttgtcgattcaagaccgatagcgttatgaaaggctcaggcgcacgagctgaagatgtagaaatagtttttggtacaaataatcaatcatttgacatttcatctaatcttgatcatattgggttcagtagtaggggtaaagtgctagttaaatcaattgtaaaagatgctgccaagtccttatttaaaggaatgataaaaatccgaaaggatgcacaggcttcagaatcttatttggccgggcatgcaattttattaaataaaggtgcccaggcagatgctattcccggattggagattgagaccaatgaagttaaagctacacattctgcgtcagtatctcagattgatgaagaacaaatattctacttgatgtgtaagggtttggatagagaaagtgctaagcgggagataataaatgggtttgtggaacctttatctcgaaaaatgggcccatttattcgtgcttggataagttatctgtttgagaacaagtggactggaaaacctctaatgttaaagggtgatgaggttatggaacagattcttgaagtagaaaaatcacgatataaagaaactgcagatatatttgagaaacattacaaatacaggtaaagaaaaaatttgaaagatgaaactttacatcattacctttatttttatatttgaattaggtgttataaattgaccagcatacaaaaatggattgatatttcccaattcctcaagttaaagaaaggagaaatggacgaatttgattatgaaggcaaaaaaatcatgatattaaacctaaacggcgaattttgcgcctcagatcgcatttgtactcatgcatacgttgacctgaccgggggtattttaaatgaatctgaaagaactgtaacctgtccattacatttatcgtcttttgatttaaaaagtggcagcgcattgaacctgcctgcagaaaaaccacttgagatttatccaatgaaaaaggaaaagaacaagctgctaattttgatataatctttacccgtaattatattttctgtctatgttttacgtatctcttaaatcatttatctaaaatatgtcactatttgatcaatcgaagtaccgattccagagcaccattaatggtatattcagatgattctataaaatctattttatttttctttaattcaagtgaagtttttggtcctattgaaactaccttatttacctttaaggcttgaagtacttctctttcatttttgcgaaacgataattgagagaattgatgataaattattttaaaaaaagatctgaccgtagaggggcttgtaaaaatcagaaatattttttcaacgcgattaggtaaacccaataacttctcccactcctctgaattcgatacatttttgttttctcttgtttcataaaagaaaacttgatccagtattatattttcgaattttgtatcgatataattattagactttactgattctgcacttcggggcatcaggatttttgggatttctttttgatattctgttttgcattctctattcaagttttctaaaaactccagtatatccgatgaggaatatttcttatcgatgacattggtagaagatcctaactttgacttaaatccatacccctgcaatgtttttttggtcttaggtccaattactatcatatttatcttatttagttcctcgatgattctttcatagttgtgttggttttttgcaatttcaaaaaatattttgaccgcattcgagctcaaaaaaatacaatagttataaaagccattactgagtcttttaaaagattctctcacttcttgtgagtcaattttattaaaagatatggtgggtaacgcaatcaattcaatcccatctaaatgagcttggtcaatgttttggttttggatatcatccgtcaatactccttcatttgtaatcacaataattattttttccaacttatttgattgtctctttctttttgattagaatcatgattccccactggtttgttgaatgtaccatttgatcttcttgtgaagatttactatgtttccaattataactatggctgggggttttacattatattctttagctaaactaactatgttgcctaagttgccagtaattactttctgattctttaaggtgctgttttggattattgctactagggttctatcatcaatttttctcccttttattttgtttatgatcaattctaacttttctgttcccatatagatcaccacagtatcaaccgcttcaaataatttatcccattttacttcgggagttttcttttctggatcctcatgaccagtaacgaatgctacagcggagccgtactttctatgggtgagtggtattccagaataattagctgccccaataccagacgtaatccccggaatgatttcaaatgggatttcattgtcagccaaaatctctgcttcttctcctcctctcccaaaaataaaaggatcaccgcctttgagtcttaatacctgtctccccatttttgcatactttatcatcaactcatttgtcttattttgatgtgtagtcgggtccccgacatttctaccgacgtacactttctctgatgtatctggaaatagtttaataatttcgtctccaatcagtctgtcatataaaattacatcagcttgttttattaattcaaatacctttattgtcaataattttggatcaccgggacctgctccgcaaatgaaaactttgcctagtctatcgttgtttttcattctatcaactcatctaatgtatcgatattcatactagtattattccattcttttgttatttctttagccccttttgaaattaatacttctgctaccattcgacccaattttcgtgggtaagcagcattatattgtttctttactttgatagattttcttccgtctaacgaataaactacggcaaaaagtgtcattaacctatccttgttttttaaagtggctaacgctcccattggaactgtgcaaccagctccaatactttcggtaagagatctttcagcctggatttccttatgcgagttcttgtgctcaatttgctttagcatttttacaagatctttgtcatcttttctacaaacaattgctagggctccttgaccaggaactggtgtaaagctctgaatactaagtctttgtgtgatctgatttttcatacccaatctctcaattcctgcttctgctagtattattccagaataaggattttcttttgatttgtttattcttgtttctatattacctcttattgactttacccttaattttggatacttggttctaatctgtatggctcttctgatactacttgttcctattatagaacctgtttttagctcatgaatcttattgttatttatactgtttataaaaacatcgttcggtctttctcttttgggaatacatgctattactaacttatcagatatccctccgtgaagatctttaagactatgtactgcaaaatcagctttatactgaagtaatctttcattcacttctttttcaaatactccagtttgattaattacataaaatggtcttttatctctgtcacctttcgtagtaactttgtccattctaatgtttaggtttggtttaatttccctcaaagatgaaataattaagttagtttgataagtggctaatttgctagctctagtagcaacaactattcccttaataccttttcaccttcgataatgccgtttcataagcatctaaagttttttcaagatcttcctcattatgttgagttgaaataaaacaggtctcaaacggggaaggtgggatgaatacaccttttgcgagtaatattctaaacatgtccataaagaactttgtatttgatgattttactgaataatagttgcttattattttatccgaaaaaaacaattgaaacatagagccaatagaatttacggtagcgtcaattttcttgtcttgtaccatatttcttactgcttcaactaatttgtcacaggttctggctactctgggatatatgatgttcttttcatcaattaagatctctaaagttttcaaggctgctgttactgaaattggattcccagcgtatgtactagcttgatataccgatccacttggagctaatcccgacaatatttctctgttgcctgcaagaagtgagatgggatatccatttcccaaagttttggcaaatgtagccatatctggttttataccaaaaaattcgcttgctccacccaaggctaatctaaatccagttaccacttcgtcaaatatcaaaacaatgttattttgtttagttaggtttcgaatactattaagataatctttttcaggaagaattagacccgtattagccataactggttcaactatgatacaggctatgtcattgcgattctgttcattatctatcgccgaggtaagtgactctagatcattatagggaacggtgatggtttttgaggcactctctgataatatgccatcggaatattcttggttggctgccccagaaccagctttatttaggacataatcataagcaccatgatatccgccctcaaattttattatctttgattttcttgtatatgcccttgctaagcgaatcgaatgcatagttgcctcagctccagtattcataattcttatcatttctgcacatggaattattttggaacaaatttcagctagctgagtttccttttctgtaggcgtacaaaataaattgcctttgtctatctgactctttatttcagagcctatttgttgattaccatgtcctagaaaaactgatccgtaacctaggcaataatcaattaatacattaccatcattggtaaatagcctacttgcgttggcagattcaacaaaaaaagggtacggttgaaaatatctgactggactattaacccctcctggaatcactttggatgctttttcaaatagaatacgtgatttgtcaaatgttatatccgtcatgaggtataatgatattgttggttatatgttctagatatacattatctaatattttagttatcaacactttttgtctaaaaatgtctaactttcgatcatctcattaattgagttttggatgattctttgattgtttctaccttctggatagatgcatatctacatacatatttacattcattagctactaatcaagtgatcgaaacaattttgttttttcttggattttcatttgtttggagtcatatgtataagacaaggactaagtagacatctatgctatatacataccttcttcatcaacaacaagaaagggacaatttataaatactagattttgatctgcttggtcaaaaaagtagaaaaaatgtgatttaagggacactatgaagaaactctatcttgctgctgccaatattattaatactgttccaactattgctagaataaaccctactatcttcgctatggtatttgcacaaggaggcagcatgcttgaaatcgaataaaatattacaccaattatagtaataattattccagaaacccaactcacataatatttgtaactttattagaatatcattgtttagtgacaatcttttagcaaattctaggaatgctcaactaaaaggctgacattccttctgtaatgattttatctattgcagcggtcccgatattttgaccttcagtgtgatttaatcacgatctggtttattgaaacatccgaattctaaatcttagtatttggcacgttagaggatgattaaaaatgtatcctaaataatcgccagcatgattttaaaaactagctgcttgtttcctgattttggttttttttccaaattttctcgctttttctagaatcttgtaataggtcattgtttggttaaaaactaatgagataatgaatatagtcgcgagtattacagcaagcataaaagttaaatgctgtaaaaaactcatacctattataaaaagtcatacacttatatgtctaatcatttatatgcgtattcttaaatagacagaaattaataggttgtaaaaaactttgaattaataattattttttagaaaattcagatcaccgaaagtggctaggtaggaaaacctgtcaactgctggactatctctttatggacagatccttcaaaatactttaatcacttcttaatttatctttaataagaaattcataaaagataataaaggcaaatgtccataatagttaatgcaaaattatgtaacattaatccttgtagttttgttgataagtggtttttcttctttaggcttgcttgcaactaccactttggcattgcctattgattttcttgacaatacttatgtttttggacctattactgggttaacacaggataataacggtacaattgattgggtacttgcaggagtatggagagcgagcttacctaacgctactgatacctcctctgatacaaacagtagttcatttaatgcagcaatcgaaatgattcgacctgatggtactggtagacatacccatactgtaactgattttactttattaaattcatcgcaatctgatactaattctacagtctacaatgggacttccagtgttagccttgccaaaggtccggcacttgacattcctacttccattacatcgtcaaataagagtataatatcaatatggcttgatcctgaaagtgtggatcatcattttggtgaatcacatacaatatttggaatagtagcgagccctgaatttgacaggtccattcagaattctcctctacaaaatggacccggtaataatacactggatcattaaataactggatttttcttctctttatttttggactttaaaaaactatttaaataatggatcattgatattacgagatgaagcttattccatttgctattttaagcccacttgtgattggtgtgatgttattaacggcaagccaattctctgcatatgccctcgaatttgcacataaaactatgtggggggagaaaggtgttgctcaaggtcaatttaaccaggtttctggtatcggtgttgactctgaagataatgtatatgtatcagattttgccggctatacaaccaaaatgatccaaaagtttactcctaatggcacatttatacttggctttggtacttttggcaatggaccacagtactttactaatcctgcaggcattgcaataaattccaatgattctgtttacatagctgactatggaaatcccacgtatgcaataaaagaatttacttccaatggcacatttattcgatctatgggatcatttggtcttggtcctggattatttattaatccaggtggtctcggcgtggacaaagaagataatatttatgccacagacatcggagaaaatagtaatgtacagaaattcgatcagaatggaaatttcttgactagttttgggactccgggtaatggtaatggtcaatttaataaccctgcggatgtagccgtggattcaaataataatatttttgtaactgattctagtaacaacagggtacaaaaattcgatcaggatggaaattacttgatgaaattcggaaccttcggatcaggcaatggtcaatttaaaaaacctatcgatttagcaatagatcctgctaacaatgtttacgtgacagatagtgataataacagaatccaagtttttagcaataatggcacgtatatcactcaatttggaaatataggtgcattacatgagatggttgaggatccggtcggaattgcattggattcccaaggagatgtatacgtggccgatgggagagatacagacattcacgtgttctctccaataccttaatttttttataattttctatagcattatacttgattacctaatgtttgactattctataccaaaccaaactaaactttcattctttaactatttcttaaaatttctgccattttttttgcataataagatattataatatttgcacctgctcttttgatagccgtcagagattccgtaacagcaagattttcatccatccaattattcaatgtagctgcttttatcatggaatattctccagatacactatatgctgcaattggatgaagagtattttgctttgcagcataaattagatctaaattgggtatcgccggttttatcattagaacatcggcgccttcttctacatctgatttgatttctctactcgcctctcttgaattatgatagctcatttgatatgatagtctatttccaaattcaggttttgagtgtgctgcgtctctaaatggcgaaaaaaaagatgatgcctgtttagcagaatatcccattattagtgtatctttaaattcattatcatcaagaatatctcttatggtttttacctggccatccatcatggctgagggtgcaactatgtcagcaccggcgatcgcatggcttaaagcagtctttgtcagtatatccaaagatttgtcgttatcaatctcatttccatggaaaattccacaatggccatgtgaggtatactgacatagacatacatccgtaattatagctaatttttctccaaagtttttcttaatggatttgatggtttcttgaacaatgcctttgtcattgaatgaattttttccattagagtctttttttagtgggatcccaaagagtattattcccttaattccaagggttgaaatctggtcaatttcttctaaaattttatctggagaatatctaaatattcctggcattgattctatttccagatttttgtttatcccttcttgaacaaatataggcataacaaagtcttttggagataaacgtatctcttggaagagttctcttatagcagcagtttttcttaatctccttaatcgcattttcggaaagagttcataactagaatgtttatctgagatgaaagttgtgttatctctaaaatcgctatctatactttggttcttgtctatgttccttgatttatctacgttacggtttttcataattaaataactttaaagccaaatttattaattcattttcatttttattatttgcaaattcctttcgtagattattcataggtgtagataatatcccttctaccagtgcatatgaaaactgttcaagaatcttaatatcatcattactaactctattaccaattagtgataaggcctttttgaattctttgtttcttatagaatctgcattcttgaatatggttattatagctggttcagaactctttctttttaaaatttccttgattgctatcagttcatcatttattatcttttctgctgattgaatttcttttttccttcttccaacattcttttctacaatttctgaaatttgatcgatatttaccaatttgatattatttagagtagcaatcttgtcttctacagttctgggatttgataaatcaaaaatcattaatcccttgtttctgtttttcatcatattggcaattctctcatatgttagtaaataatatggagcaaccgttgagatgaatacaatatctatattgtcattgattttttccaaagccgtttcaaaaggtatgggggaaccagctacagtatctgcaaatgatcgtgctctttcaaaagttctgcttgtaacaaaaaatttcatatttctttgtttcagagctttcgcgattaaactagctccctctccagagccaatgaggagaatctctttttctttgatgtcatcaaaatattcatacgctaaatttactgccatagacccaactgatgtgcttcctttgttaatacctgttaaagttctaactctgcttcctatttttatcgtcttgtcaaaaagtatgtttagattcggacctgcaaatccgttttttcttgaaaactctagggatcttttgacctgacccaaaatttgatcctcgcctactactaacgaatcaagcccagatgttaatttcactagatgttttaaagcttcttccccatcgtttattattacattatttttcacttgatctgctggtaaattaattaaataagaccatgcggtaattaaattctcataatcaggatttattcctacaccataaatttcaacacgattacatgtctgcaaaataatacattcttgcaaatcagccaaattcaacaggtgttgatgagcatcaaaaatatctttaaaagcaaatttttctaatatgtgaataggggagtttttaaatgtgactcttatattgacaaattgtgatgattgtactcctagatatagcgtcatctgcttttattatcctcccatttatctaatgtattaataattctttctttggccttatctatgttattttttgctattaattcttgaatctctcgatcgtctactatgctgtacaaaaacttccttctttcatgttgattctcgatgtagtctcttacatgttctctggcaaattcttgaattttaatattatctgtatcttttttccctattatattttttatagcattttcaattctgtctctaatgattttgctcattaaggggcttttccccgacgtggaaattgctatctgaattatttcatcaacatttattatcgaagtgaaaaagaaatcacttgctgaggcatcatcaatgctataagatagtagtcctttctcctttgccctctctataatttttttgttcaaaaatggatcattagttgatgcaaaaactacaaaaatatcattaaactcatctatgatacttggatcctcaatttttcttcttattataatgattggattattttttccctctatttcataaagcgattcattgacagtttcgcttattactattattttgcaatcgtgtttagacaacgatattatcctcttggcgccctccatgccagcccctatcaccaagatatttctgcctttcaggtttaagtcaacaatcacgtttattaaagatcgtcttcaattagatttaatatagtttatttattaaacccatgactacatcatgcttcaggtaataaactaaaattatggcattctttttcgttagattagtcccattccatatttttctaatttgcctttaacattgtttagtccgaattattagcattattgaaatattggattagataaaataatgtatatttgaattttagtccagattctagtccgttctttaatactaaatcgaataaaaatcctttttctttagatttattacctaatttacccgatgatatgataaagttattaaaagaatcaggctatctgtccataaaagatctggttatagagggaccgtttgaaatttctaccagggctggaatcagtatcgatgattctaccttcatttataatcaatctattacatttcttgaggagtttggaataatggaaaagcgctttactcccgctaccgccttgtatcataaacgaaaaaaaataggaaggatttctacgggttctgagaactttgacaaacttcttgggggtggaattgaaactaatgctattaccgaagtttacggggaattcggaacggggaaaacgcagttatgtcatactgcttgcgtaatggtacaactcaatcattcggaaggcgggctagaaggcggagcactatttattgatactgaaaatacttttagacccgaaagaattgatgccatttcaagagcccgtgctctaaacccaaataaaatccttgataacattgtggttgcaaaggcatacagtagttcgcatcaggaactgatattatctgagtcaagcagaataattgagtctcaagacataaagttaatgatatttgattctgcgatctctttataccgttctgaatttctggggctatctaccctatcaatccgtcaacagcgtttgaataagttagttcatactattatgaggatcgctcaaactcaccaaatcgccgtcttattaaccaatcaggttcagtcctcaccagaatcgggttttgccgggaatgcctttaaagctgctggcggaaatatcttcgcgcattctagtacataccggatttttctgagaaaggccgacagaaatcggatcgctagaattgtcgattcgccaaatcatcctgagagtgaaattttgttttcaataggagaatctggaatttctgatcctataaagaaatgaagtacaagtagagatattgtattttgattgtaaataatttttattagggtatttatgaaatgatgttatgccctcatcacacggaactagaaggaaatcccgatcgatattaacaaaatctaacaaaattaccggtatatcatatttgctcatagaatataaaccaggtgataaagttgtaattgatatagacccaagcgagcataatactatgcctcatagacgttttcagggcaaagttggaataatcgagcatgttggcagacgcatagttaaagtcgttgtagtgttcggaagtaagccaaagtacttgcaaacaaaacttaatcacattcgaccaatagttgtctaactaattataaagtgtgtgcttgatttgcctgaagtaataaaaagagagatcgtcactttgtctgaagtgaaaaaaatattagaatctattcctgtggatgagatggatcaaattcaacgttggacatttgattactctaagaagttttcaaaggttgattacgagccagctaaagaaatggtcgataggcttatggctgaaggtgatttgaccactgaagagtctgtagaattggtaaacgtaatgccgcggtccatagaagaattgagggcttttacatttgggtggaaaaaattaatagttacagaaaaacttgaaaagattaaatccattttactctctaagagtgagaataatggggacgaacaacttcaatcacaagttgaaagttaaataaaaagtcatttcttatatatttgtaaaggtaaaacatattttgtcaaggtataattcaaacagagataattatagcagacatggtgatactttttctccacgaaaattcgaagagtatgcttacattttagattatattcaaaatggaaaatcttctatagtgagaatgagggagggagtaattattcacgcaataggtgaagagcatttaacattattggaattattgggaattagtaacgaaaaatttagcattggtgaacgtgtgtatatcggtaaagatgggcgtgagaagattattagtgtattgggcagacttgattatactcacatttctcaatccgcaaaaaatgaattaccaattgtaattgaaaaaatagtcaatgtaaatgaaaaacgatttatagattatttcaattccgctcaaccaatgacaccacgggttcattcccttgagcttatccctggaataggaaaaacatacatgaagtcgatactggatgaaagagataagcgaaaattcgaatcattttcagatctacaaaataggacaggattacgagatgtaacaaaattgattgcaaaaagaatatacgatgaaatttctggcgaaacccgaatgaatatctttgtaagaaaataggggtaatttttattccagaattttcacggcaatctattcaaaaaagttaggtcacaaaatttctcaactcacattgaaaaaacctactattttaggacaaaattttctcgtagatcatactatgatgagaaaaataattcaggaatctaaaatcaatagagaagatgtgatatacgaagttggaactggaaagggcatccttactgcagagctatgcaaaatttcaaaatttgtacattcattcgaattggattctactctgtactcgcattgtaagagaaatttgaaacatgcgaatttagcattattgcaactggatggttttaatgaaaatctgactattccctttgatgtttttttctctagtctaccttactatgagagccgaaacgcagtaacatggttgtgccaaaaaaattttaaaaggggaataatcctattacaacgtgaatttgttgaaaaacttctctcaaagcctggagagaagaattatagggctatttctatattgtctcaatataggttctcaatcaaaaagttattcgatgttcctcgtacgtcgttttcaccaatcccaaaagttgattcggtcttaatcgagatatgcccaagaacatcacccttaacaaataaactcattaaggacattcaattcttgttatcatttaggaaaaagaccatctcctttatagtcaattattttaaaaagaattataacagtgaatttgacgattttgatcataatggatttggaaaaaataaacttgtaaaattgtctcctgaagatataattcgttttagtacatacttgaataatacctttaatggcaaacagataataaaaaattgattcattagtcaaccataaatttcagaaggaagactagtatctacagttgatatcttatttgctatttccttttgctttttccatcgtcatacatatacaagaatattccgcattaaaacaagctccgtctaacatttgtcttgatttacatatttttatgatgaggtctaggagaaaaataaattatccaagtttattgtgacaccttctatccactgtggttgataatcttgttcataatcatccaaatgttagaaacaaccataattcaaaaaactagaatattaataaaaataagtgatatttatcatgatgtttaactattttttcaaggcagaacactgtaaattatataaggatttctacaactattttattatcgattgcattagaaacatttagaaatttgtattaaaaaaagatagtttgtgttgtcttgattggcgaatacagtatactatttcaaggtattcattcggtttcatcaattttatggtggagtgttaccctaattgtagttgttattattagacctctaaacggaaggggtaacttatctatcatcttgccgcacattcgtaaacttgtgatatttgcctctacagtttctattacaagcggatttgtcctatttggctttaattcaaatttccaatttgaggatttgattcatacaacaaagggtatcatcattctatttggcggttctctatccctagtagtttattatcatgttttatctggatcaaagcccaattcagtggcatcaaagttgcacaaagggttgaaattgaataaatttattccttacattatgttcggttttcttactactgccatggtatcaatgatccttgcatctgcgatcatattttaaatatatcatcaaccttgaagcagtaaattcttgatagatttcactcgttgatttctaataatgcattcaaaattcctctttgatatttatttgatgatgattttattttactattaggataggacaatgagcataggtagaaattccggaggctacgcttcctactattagttttttccaaccggatttgcctttggatccaataattattaaattgatattttccttctcagcatatgttaggataccttctactattgatattacggtaaacacaacttcagttctaatttgtacatttcttccctcggctttcttgtttatttcttcaaaccatttttctgcttcttgctttgcttcaagattcaaatcatttaaagaacttgatgtaatggctcccgctactgtttccttatgaaaagcaaagcctgattgtgaatacaagacatgcaacgctaatagctcacttttatatttatccgctaggtccacggcgtaatcaatggccttcatggaatttatagaaccatctacggggatcaaaatcttactaaatatattattgttcacgttcatctatgaaaacattttccaacataaaactattttttgaacggttttgattaaatagttaacattagatgtttgtttgtcaaaaaaacagtaggttgttaggtaaatcttaaaaatattttctaatattttttgagatgactattacattttatatctaacacttggtttaagtagaacactttcctgataataaaacttatatgcgaaatttaacaacaatcttgtgattgccaaaaacctacaatcacatttttgtcgcctactctgtgactagcattcttgtatgtgtaatacttttactagtctcttttaatatgtcctatgccgtagaccccctggaactcaatataaccgataatcccagggcttatatcaaaaattattcatcttatcttgatggagataataacatcgtaattattggttccgttgcaaagtctgattatcagatttacccacaaaatgttaccgtaggtatcttggcatataacaatattaccggcagtcatgaaatcattgccgaaaaaccctataattcaatattgtctgaaaataatgaaccgtttcctttcaaattcaaattaaattctactatttttcctctagcaacaagagctgagccatttattcttgagagcgaaaacgttagtttgcctaccactaaattaaatactatcaaattggactatcccgtaatccctcaaggtaaaaataaggaattattcggcaatataaccaacaccagtcctataccactcaataacatcaccttgtttgctattgtaaatgacaaaaatagcacacaaatagactctgtaaggacctttatacctgttttaaaaccctatgaaaaagtacagttttcatttacaccagatcctgctataaaggacagagtttatttttatagttgtgttggaggtgacatcgatgatatgaaaattgatgaatttaaaattgtcaatatatctgctacaaaaatattaggatataaattttcagcactagttcaaatcgattcgatgaattataatgatagcagtaaacagtttgattttgcaataaacaatatctatccttatcctgggtcactatctgtagaattaatgcccatgcaaaataatccagtctctatcatgatggacggatcaccttaccaggccacaaacttgaaaaacaccggtaataaaactgcaatagaattatcgataccacaaggtatccatgatgttgcaatattaaacatagaggattaacaaatagtatccaacatttgaaaggactatgttggatgactatattggaaaaggaaaacccaaaccggactattcctatgaattaattgcctgggatgtatttgtaactttggctataaatgatgcctatagcccatataggaatggtaagatcaggagaaccggcttgtgaatatgaaacaaatgaacatagcaatgtggttttacctctaatcaactcattgtatcacatttacatggatgatttgtcttttagagattctattgaaagtggggttcctgaacatggttctttggatagttccaatacaaagttgagttaaaaaatgaaacttggataaacgtgaagcctctgatagattgatggataaaatttgcattaatgagtgatcagcctttaatcttgcgaagaaacccattctatacattaagacacttgttacgatttgggcttttaaaatccgactgtatctcaaaaatcactaaagaacccgctcaaattattgggatggacaatattggacaaatcaaacctgaatttatctcatcaatgataatatgaaatggtgatcctttttcattaccagcaaccatatcatggagatagctgaaggcaataccacttatcaggagtaattcttaatatttatagaattaagttcttgatgatgattgatgcagagtttattattaagaaattggaattagagaaacatatctctgaaggtggatattttaaagaatcatatcgttcccctgataatatatcgaataatggatttcataacaagaaacacggacatgagatttctgaagagaccactcatcctgaaaaaatacgtccagcttcaactttaatatattatttgttggttggaaatcaatactccgctatacatagagtcaagagtgatgaaatttggcatttttatttgggtagtcctgttaccattcatttaattattgaagaccatattagtccacgaattaaacttggcaataatcttgaaaacgatgaaaatatccattacgtagtaaaaaaggatacttggttttgtgccgaagtaaacaacaaaatgtcatttgcactgatgggctgtactgtttctcctggatttgattttgaagattttgaattgggtaacaaggataaattgatactccagtatcctcaacataaggatctcatagaaagatttgcaaaacaataaaaccgatatcaaaattctattctcttattacttacctgtggtgatcccttaaaatgcgcgatattcatgctaaatgttactcattgtattcatagcattgtatcaattaagtaatttactaaaatcttgtacagtttagtcgaattgaatgggtatcctttattatgaaggtataattatttcatatttctttctgcatagtttatggatttgctcttcgatatctctggttgtcaatatcatttgttcatcaagttcttttttttgcttagcaatctcatctttagtttgattttctaacatgatgatcctctcatcttcttttctctcatcttcttttctccttaattcgtcgaggactgctattttgtctttgtcctttaatcgatctactcttgaatctaactctttgatctcagctttaaattttggtaattcgtctattagcatgtcaaaatattgtaatacctttttagcatcttttaatacaattttattactccttacagattctttgatatcttttagtagtgttatgtattctgacatatctggcttggaaactatttctgaaggtttatttacaattgtatctattttttctaccgttcctctagatagtccataagaatatttatttgccgcttttgtcaaacggttggaaatttcgtagagttcattaatagatttctttctctccttatcaatttcctccttttcttgtaggtattttaaacatttaccatagtctgaagaggattttattgaattaatttccttttctctcctatcttttacttccttaagctgtcttatcttttgatcaagatttttaattgtggtagcagccttatcaatttcatctattttggaatgcatgcttaagaggttagatctacactgttctatcatgtttctttcctcggttatctgatcatattcgtcgtttaatatttcagaactgtcacttattctttttaattctccccttaaactatttgcatgttttttcataaaggtattaacgattctgctatgcgagcttgtaacttcgccgaatctgtttattgacgcctccactgattccctgaatttgatgaactcttcaaaagtcttgggaatgggtaagatgttggaagattcgcgttttaatgcccttacaatggtattttttgtattctgcactaagggcatcagtttttcttcttcggtattaatgacttcagcgtctaaatcctctgcaataatattaatgtgttgaaaggctagattcgtctcctcaaatgttttttccaaattaatcaagagattcttagttatccttccttcactcttttctaactcttttacagcgtcctcaatagtaattttattgtcttgggcttgaactatcggtattgttgaatttgcagcaccactctttttattacttaattttgaaatatctttgtcttttttcttaaaaaaattaaacgagggcatgaatctatattaatttcgacaaaaataagtatatatgttaacggaaaaatccgaatgtatattttccggactatattggatcataaacggttttaagtagataagatatcactcactcaaaactcactaaatcctgattaatggtcattaattctcctttttaaaattcactggttaacaaaaaagacctaattgtaataattgagttagcaaatcaataaaatggttcaaaaacaacaattctttagaatggaaattatgttagtcctaaactcggagttatgtatgatagttatttttcccttagattttgtcgtttttttattagatcgttcaaacagtatctgaaggcaagatactcgaggagtaaacctgtatcgctgtctgcatctcttgccttgtttataaggactttgcaggttttcgtcactatgggatgaccattattaatagagtctgcgatggaaacgcattcacgtaatagtttttcttttaataaaatagagtttttggttatcgggttatcctgttgtttttcatcatcgtttaatctgactatcttattgatgagttttattctatatgcttcgtcggcgtctattatttttccggtatatatcagttctttggcttttgagatgcctactattcttgataatctctgcgtacctccccacccaggtgaaattcctatcttaacctccggttgccctatttttgcattactggatgcaattctcaaatcacaggctagtgctatctgacatcccccgcctaatgcaaaaccattaatcgcagcgagtacaggcttggctagcccttcaattaggtttaatagttcatgaacatgatttgcatattgtattgcttcattaggagacatcttaataacgttgtttaaatctccaccagcactgaaagagtttaatccttctcctgttaagattacggcaccaattttctcgttggtttcacataaaccaatctctcgctttaattctgtaaccaaatcgaaattaatcgcattatgaacctctggcctattaattttgattatactggtgcctcctctttgttcggtaatggtgtatctcatgttctgcaattaaatattgtattttaattgtttagatatttagattatgtatatctttgatctaattatttaatattcagtttttactctttctattctctttacatatcataatacctactattcattcaacggatctgccaacgacattctttataactagcagacagtcaaaaatatcatgtctacaaatacccaacaatttgaaaatgaatcctatttgaatcttgaaacttatagaaaaaacaatcaaccagtagttacaccagtttggttcatcttaaatgataatgatatttttgtagtaactaaggaaaagaccggaaaagtgaaacgccttaagaataataatgttgtgagagtggctccatgcaattatagaggccatccaaaggggaagtggatgactggcactgcacattttgttgactcgcaggagaaaagcgatattctaaaaatgagagataagaaatatggtatcaaagcaaaaatggcaaacttacttagtatgcaaaaaggaaattatgttgtaattgcagtacaagtttgatattttattactgattttttcaaacatatgggtttacagggtatttgggacaatcatataaataatcatcaatataaatatcattcaatcttttcatgacccggaatcgcaattatgattgataattgattacaatattcagaagtaattactatttgaagtgttggattggaaatttcaattagaacgaggatccgtagcgcatctaggatcgcatcagcctaaaattcgattgtcatttatttgaatatttaacatataattgataacaaaaaataaatatcatcactaattagtaatcagtatatcagagataaaaaaagagaaaccggtaagttctaaaaaaaatagaatagaaccatttgcagtcgcagacgagaattcttttgacgatttactaaaaaaactcgatgaagatgagattaaaataattgttcaactatatgtaattaaacgaggtaaacgagtaacaaacatcaaggggtttaccgatcaagaaaaaatggaatcaattgctcatgaattaaaaaaatccataggtacaggtggaaccgcaaaaaatgggatgatcgtattgcaaggagatcatagatcaaaggtaactgaatttttgttgaccaagggttatcctagagaagctatagaagtaatttgattgagaatacatatatacaatccaatgatttttttataatatgattattgccgcgttaattccttctttctcattagatttggagtatgctgacattctgatttcaaagatataagtaaactgcaataaagctccatgagattttattgaattttttgacaattgtgtcataggcggtatagttcaatatacttgtctaatttatgggggtatattgcttttttacctaacaatgtttttcaattgtatgactatttgtattagtatgatttttaatttagagactctgcaacctatttttccactcttagtttctacaacaacgaggttgcagactataaataaattaaaaaactatgattaacgttatgtttttgctacagccgaccaaattatcgtaaaaaaagataatatcgacactttagattcaaaaaaccattaattagcataatgaaatgatgctttaaaaaaaagaaggatattgtgtagagattgtctgttctgatcatggattgattgtcagaggattttgttgtttctcggttaagctgcttttccaatagtttggcaggttttgcacccagccatcataaatattaggaatcgctagtactccttgccctcctgttccctctaaatctgttattttgtcatcagttattgtatcctttgaagcaacaagtgatacctttccagcaatcgatgcatctactggatttccatcattgtttggatccccatctactactatagcctcatttgagaaggtacttgaaacgtatgcatagtatccgccccctttctttgcaccgaaattaactccgtgacatccggcatcacatggtaattcttttactacctgatcagtgtcggtatccagtattgttattgttccgccggtatttgctgttaccatatattgaccatctggacttacaggtgtctgtattggaagaaaaccaaccggcccagttgtattacctgttattggatcgtaattggcgaggaggttaattttctttattagcgtagcgttggtagtatttatgacactcatagtactgtcaaaaaagtctgcaacgtatgatttactaccatccggcatcattccaactgcaacaggagatacgcccgtctttacttttccgattattttatcttgcgtcatatcatatatggttgtagttccagtaagcgcatctggagttaccatgtatctgtcatctgaactcatccaatgaccgtgtggatgagttgagggtgctgatggagattgtaacaagataaacttttcaagattaaattcaggattcggtgacaccacagttactccatcttcaccgtttaacgctatatacagtttgtcagttgtagttccagtcattacatgagatgggtcatctccaacttgtatgtcctttacaagctcaccagttgtgcggtcaaatatggttgttctgttatcaaaccactgagtttggtaaatgagttcttgatttttgtcagtccacatgttgtgaggattattcatattgatttcaggcaaagcaactttcttacttacgttccaagtggtaccgttaatggccgtagcagttcccggtttagtcttgccagcagttttttcaaactgtgtatcaatccatatttctcccactgcaggaaccgttggatttgacaaaggagtcaaagtaatgttttgaccatatgtcttttctaatacatctttgacattaacgacagtcccgtttgttactctagcatctacatcaggatatgaaacgtgccatggttgggagatatttgtataatcctgccagtttggtggagaagttgcaataaagaatgtccttaacaactttaaggccaaatcactatttgtatgaatcgtaactccgtttatcaaagtaagttcttcgcccaagtccagtccctctgtatccggatcatcaacaatgactgcagcaagcatgaaaggatgaagactgcatgcaaatacgtataatccaggctcgtcaaggtttactattgctcctcccttgtatgccatcatttgactaaatggcatgtggctagcgttcttaggatatattatgctagttacggtgtgaacgccatgtgtactatccatcataaagttaactgttccagacttgtttattatcgctagtgattcgctacctgtgtttgatatgtcgcctttgagatttgtaaaccatttacctggttcatcactaattgaaaaggatgcaaagtttttgtagggtgatgcgccaggaatacttttttgggtcggcttgtcttctatcatcattgtctttacttgtgaggatgcgttggcagaaagtaccttaaaggtagacatcatgcctgcttccatatgagagaacacatgacaatggtattgccagtcgccaggacccacaccatcacctgcatctatgacaaatacatgggtcttacctggatggatttcttttacatcaatgatattacttgtacccggatcgacccatctgtgagcatgtaaatggaatgtatgagagtgaccattggggtttgatgacgggcctattccaacaatgtggaaacggatcttttgattctcttctgctacaggtactggatttgtccacaggggagtttgcgtaccgttcctatctacttccatcccccaaaaggttgaccctaccataaacaataggacttctttatccaattcatcgagaggtatggttgttatttttccatctacaagggcctctgtcatcctatccttaggattaacaataactactccatatagtcctctatcacctaattcgtcatcttgatatacgtatgttcctggattagatgcaacaaaatcttcttgggttgtatttccatctagatggttgattgttatatggaccttgtcaccctcgcttatcactatagccggtccaggaatggtggctatagtactatagttatttgtgatgtttaatttagtaccattagtttgattaattatatgttgaatcattttatatgctggctcaccatctggtagtacctgctctttaatcactatgtcatgtacagcagaacttgaatttagaaccatgtttccatcagttgtatttgacgaaactttagatgatatagtatcaaataccttaccatcattgttatttgtctgagccattggaataaatgattcaattcctcgtgctatcccgggagctgtcattgttgaagacaaaattagcgttgcaatgactacggcataaataacattaattttcttgatccgtctagtatggttattatcgttgttgtatgacatttcaaaccacctctttatttattgaattttcaaatacttgtgcatctaaagaatcggataatacaaaatctcccttcatacctccgagaaggttaattgtcgaattatcatagtagcttgaatttttgttggcttcaatagtaaaaacatgatttgcaagaggacctattatatgagagttgataaccttgcttgttcccggacttagccattcgatattatccattgtgaaattgtgaaattcgtttcctgtcgattgaatattgaatctaacgatactattattggctgcagttaatgtcggattggttcccaattgtgtatgctttccaccctttgaataatctacttcagttccccaaaacacatcatcattgacaaataaaatataatctttgtcgatatcgctgacatttacctgttttggaacaccattaatcaaagcatttacctttccgtcagagggatttattattatacttgaaaaaagccctactgtctcaagaccatccatgctttttcctaaaacatttcttccaatggtatgatcatgaaaaggccatgaaccagccgtaccatttgcagcatcccattcaacagtaaatggttttgtaggagaagcggcctgatcagaaaccttgtttaattcctttaatgttccgtcactagttattttatagtgcgcaccatgagtgtgaacacctggataaccccatcccatttcattaacgagtgtgataattacctcatcgccttcatttactatgatggtaggcccaggaatagtagtctcattagtatagttggaagtaatatccttggtttcattactagtaacatctcgaactaaataactgttgagattgtaagcaattcgatctccgcttagttcatccactcccatctcaatttcatgggattttacatgatggttttcttgttctatccttgggttagactgagcaaatacgttaatagcactagttgatggtagagaatttgcaactatcaaaccaaccgttagagctattattatattatgcaacttaagtaaattgtatatgtacaataacctgatcgaataaataataaaacggcgttatataatagatcggtattgaatgcaaatttctgtaatctttagcaattgtttgtatacaaaacaacgaaatctatctcgatactgcagttttgctgggtacaacattctatgtcgcagtataacagaattaatcgattggattaatcccacatatttatagaataattgaagatgacgccaaaattgagataacctctgaatagttattaaaatgtaaaactaataattattcaaagaactatttgatgctcatccttgttctctttttatatgtatcagatagtacaactgatggcaattgattaaaatgcaatcctttatgtagaaatattattataggtctattactaaataattatacctgtttgatcaaaactgtttacacataccgaaactacgatgttgcaaataagttggcttattgaattaagcaaataatctgactgaacattcatgtacggctgatgggatatgattcgatacgtactatcgtactcttcaacaaatcaaagacgttttattgtattccataatccatttattttgataatttgtaataggaacatgtgttcatatggaaaataataataccacagtgaaaacaggactactgttattatttatgaaaacaaaaattgtatatatattattcagctcatttaatataacttctgttaatgattgcatacgtttgcaacataaacatcaagtttattttttttaaattcagtagttcatatgccaatagatctagactttccagaaaaccaccggcctgtgggcaggcatcaacatgtctagaaagagcagtatcatttcgtttggggacttggaagaactaatgtagaatcctcaacaaataaggaagtaaaagatgcatacaaagataagggagaagaatatgttcctctgaatattcttggaaccctggtaacagtcgaaagggaatcatgtgtagcggatggggcttgtattgacgcccttccggtgcaggtgtgtcaatggaacagaacaaaaaacgatattctatgtattataaacaggttctataagaaatgatgatagtaatagggaaatttcctacagtatatcctggccaagaagaggaatttataaaatggttcgattggtcaaatcagttattaagggggtacccgggttaaattcaagaaagcttgcaaaagacagaaatagaaactacattgcaatagttgagtttgattcctttgacgcctttaaggctatgcataatagcaacatacattaattgattcatgacaagacgtcttcactatttagtggtatgctcaaaccagtcttctttgaggtaataagcacaatatcttaattgtatattctgataatcagtcaaaaggtaaatggaatcttttcaaccttatatccaaatggataggattaaaaatggttctgattactctaacatacttcttttttcaagaataggtgtataatttgagaatatagaatatatccatccataatggccatctatcttatttaattacttcatccaatcttgttcttccaaatagtctattagtctgagcataccctgtatccttgcttctccacccacctggtttttgcaaacttcataatgttctaatacctttttgtcctcatctacagacagtgatttacttgattcgattaattcaaagaatttgtcctcttttcctgtgtgatcatctataaaaacggtatatgattttaacaatctcgctactggttcttttagtttgttattaggatcgtttgataacactatgttgttatcttcaagcaggttttcttttaatacatttatttctcttcttaacaagtttgctattcttcttcctaactcatgttcgatcaaaaacttgcgaacgtcttctgcaaaaccatctttttcttttgtttcaggaaagtaagctttttcttctttgccgtgatgaaaattatctacaaactcttctatgattacagatatgatttcaatatgctctaaaggaacttctttatttgaatacaaattatttgaacatttttgtgcaatatttcttactcttcttatggttgtatgatcttttttcagatttttcgtagaactcaaactagattattggttgaataatacatttatcctttatttataatttggattgactgattgattgattaggattgtcctagctaagatatcagatattaatagaattattggaaagacgaacctgaaattaatttgattgcgctattataacatatccttggaaaaataaatatttaagattgattgatttattgatttgaaaatctaaatagcgtgatataccatttttttgtgtggaggcaccaatcggacagattctacaagattttgcagttataatgataattgcctctgtaatgactttgattttttacagactaaaacaacctgtagttataggtttcattgttgcaggcattataattggtcctcatagtccaccatttagccttatccataacctagatgttctcaatctatttgctgaattgggtgtaatactattgctttttaccgtgggactggaatttcctattcaaaaactaaaggatgttggaagaaaagcaattgttatagcctccaccgaagcgtttggaactttagccataggttttattgttgcacaatcattgggattgggattttacaatagtttgtttattgcacttgctatatcagtaacaagcaccgttattataatgagagttttgggagaactcaacatgatgaaagatgaatctgctactttaattttgggaacaaccatcattgaagatattattataatttcactattggcaatattccaatccactggagcgagtggagaaatttctattaatgaaattataatctccgtaggaataaccttggggtttatagcaggagtgcttgtagtaggatcaaaaatcattccaagactaatggatgttgttgcaagaaccaatcaacatgatgtactaatagtcgcggcagtaggagtggcttttgcacttgcgtttatatcatttcaattgggaatatcagtagctgcgggtgcattttttgctggggttcttgttgcagagtctcgatctcacgcagtaactagtgttttggctaatcctgtgaaggatatttttgcagcattattctttgtatctgtaggtgcattaatggatttttctctaatccctcagtttatagtgcctgcattgatattgataggtgtctcaataggtgcaaaatttgtgacggtgtatattgcatctagacttcagaaactaaacaatcttacttcgacaagaaccgcattaggatgttcgtcttctggtggtgaaatagcactagttgtagcaaagggaggaattgatgttggagcagcgacacctattattttaccaatgataggaactatgacaattataacaacatttattgccccttatgttatcaaatacggctggaaatttacagagagacttgcaaaacgacaggataatgacaaggggtcacaacaacaacaaacacagcaaccatccgattcagatgatggttcaaacaaaccactttaataataattttctaactctgagtatctttaccatttttttaagaattgtagttgtagataatatttcaataatttatgggaattgtaatctattaatttaggtaaatccttgactacagatcctacaatattatttaatttttgtttttttcttttgccatgagaacgagctaatggatatagaattgaatagtatacagaaaaaacagaaatatacaagattctataaagttagtatctgccttgatttacctaaaatagtatgtttatttctcaaatctatatcgtgatactctttgtaaaagccctcaatctatttctccaaaatatctattattactacaataataggtggatgtgtatgttatatatgccacaacccttactaccattataaggaaaataacatccttttggatgaaatttacagcctcttttttatatttaatttagataactccctagttaattatggacatatactatggggcgaatattttaagagtatcagaaatcccatccaatagttccctagtttggaagctgcagtatatctttgtattcactagtacctcaaccgtgaaaaaaaagctgaatttttttttgatacaagaatatcagttccttcaaaaattaaaacaatctataatttaaaacaagaaattaagagattaggtatagatatctttaatacctttttttgtctgtacgtctattggaaaggaaagataaaaaaaagacttgtctggaaaatccgagacatctgaaaagaattctgcattgactgcgcttgatttaggtactatggaatttatgaaatggttaatatcaaaagacacgaattctggggatactttgatagtagtcaaagactattttgataataaatatgtaattttgtttgataaaagtatattgaatgatgttattattgcttatagggatgctataccatggtgtataaagtgtaatactgatgattgcggtcatgtaggatttgcaatatgtctgaaacaaaattatgatagaaatgacaagtggttttttaggaaacaggaaaaaattatcggagtttgtaataatctataaatactcaaaaagatcaattacatcttcatattaaccacaagattgatgccaagaccgaagattcatcatttcatagggaataatagagtattgaaaaaaaacttattcaaaatatttcacaagccacttttgttcattttttatctactcaacaagtacaaaaacgttgaaattttccttcgaatttgtatattattcttgatttggaccatgaattagatcgaaaataacttcaatagatttgcctatttcttatactgtagcaattaaattctattattttaataaactttcaatagttatcttactattaacaatgcacagtgtacttcttcggcaacctttcttgcaacgcttcctagttttctaaacattcctgaaattcctttatgtccaatactacccataacaatgagatcgatgttattctgattagtaaagtcaataattatttctgcgggatcacctattttaatttctgtggtaatagaaacatactgtttagcatatgtatttttcacatcctctagaatcacaatcatttcgttctttatctcattatggatcttattaactagtggagatatagtcactgcattgtttttcgactctatttttgaaaaatgaatcggtaaaggaatttcattaattacatgtagtataaagatttgagtatgattcaccgtacataattctatagctttttccaaggctttgatagacaactcggaggtatcaaaaggtactagtatacgttcaaaaggcatcaaataataattattttcgatcaatataagcaaatgtctacttgattagactaaaaatagttgtattaactgatgatatgtatatatattttaattcgcggtgttatttcaaaaaaataacttgtttaagttatgaattagttctttcaatgggtgtcatttagttgttgacattattattgtataaactgagttagcgaaggattgcaagtttatacacaaaatcatatcactccaagtgtgcgatgctttatcttctacaaataacattattaaaatagctcataaataaacaaaaaagatcaagaagagtgtccaaaaaagtagaacaggttcgcattcacagacttctggattagagaaagaggacttaattcttcattttgccattgctttattgactgtaagaggatatcttcttatgtatattaaataagtggcattaaaattttaaataaactatttagtatcaatataatctattattaatatattttgcaatattcatagaacagttctcaatagaaaaatatgcattttctattatatatggtatcagatattgttcctaattatatcatcttattattgtcatagggcaagtaaccgcttccgatacttttcttgatacacttccaagtcctttgaatttagctaatccttgcagtccattacttcccataactatcaaatcaactctattgttgttagaataatctataatttgattagcgggatcgccgtaaagaatacatgaatcgagtttaattccgtgtatagatttgtaggtcttcttttttttgtccatatctgtttgcatgagagtttttgtttcttgatatatactattagcatgttcattcaatggtggattctcatttttacgattaattttcattttacctaaaagagttgtagtaaagggtatttcttgcactatatgtaacattaagattttaatagttcgtttttttggatcacctgaaaagatcgctttcgctagatataccgcatactccaatgcattttcagaataatgggaactatcgtagggtactaaaataactcttagatccaatatcaactataatgataatattatatcttaataaatttgctctaaccccaggttctcacttgtatgccaaagtttgatgatgaagatgatttagacaaaataatcaattgctacatttatttatctgatatccaaaaaactgaaaaacttagggtaggtgaccctctattagatgataccgatttaggacctcttgtaaactctagtggtctaaagaaaatagattctcaggttaaagcctccattaaagaaggtgccgaagtgctaacaggaggggaacaagtaggaaaaaagggtatttttatagaccaacagttcttaagaatgttaaaccaaaaatgtctatggctcaggaagaagtatttggcccagtcgctcggattatcgcagctaatgatgatgtggaagccataagaaatgctaatgattcggaatatggccttggaacaagtatatggacgcaggatttagacaaggcagaaagactttcaagcaatatcgagtcaggtattgtatctgttaataatgttgtagcttcagatcctagatttccgtttggcggagtaaaaaagagtggttttggtagggaactgtcaagatatggtatgctggaatttgtaaatataaaatcggtcaggttctatgatcaattaattaataaccatcatgtagagtgaggacggcaaaatgtcaagtaaagtaatagtgatcaattacatgcctaaggaaggaccatttgactatgtctgatggtgctatcgaaaatgtattaattcttcaaggtggtggttctttaggagcgttcggatgtggtgtatataaagctctcgtaaaaaataatatcaatttggatgtgattgcgggtacttccattgggggtataaatgccgcgataatagcaggaagtaaaagtgaagaacacactgatcaactcctcgaaaatttttgggtagaactatctgaaggctttgtagatatcgataatctttcaccattttttgcttggaacaagtatatggaacaaatgcaaatattttctaaatatggatattatccttatttttcagctttatcagcaacaatagcaggaataagggaaaactactcttcagatagaattaagatggagataaaaattaaacaaataaagtccttttacagttctgccatttttggaaatagtaaaatgtttaaccctagatgggcatcagaatatgctttaaaggatcgagaatattttactccacagaaatggactttcttatatgaccacttgcctataataaaaactctagaaaagtacgtcaattatgacaaactaaagccagaagcaaattctaaggtccgcgtaattttaactgctgtaaatgttctaaattcacgaccgttaacatttgatagttataaagagcaaataactaccaaacatattcttgcaacctctgcttatccactatataattttcgttggatagaagtaaaagatggaatctatgcatgggatggcagtctattgagcaatactcctttaagggaggttattgctgcgtcaccaaaaaaggataaaagaatatgcatagtagaaaactatccaaagaatatagatgacctgccaaagaatttgtttgaagtatatcacagagctagggatattatgttttcagataaaacagaacacaatgtacaaatgtctaaagtaatatcaagatatttagattatattgaagagctttaccaaatagtagaaaataatattgataaattacaaatagaagaaaaacaactcaagagaatacgccagaagtataaaatatacaaacaagagcatggagcagaaatcaaagaaatttactatgtaaaacgtgatgaaccatatcctcatatgtcggaaaatgcggatttctcaccgcagaccattaagaattcgatgaaggaaggagaagagaaaactaacaaagtcataaaaaaaataaataaatctttcaattaaaataacttgtaatacaaatgaagttaatttaccttaactctttataatgatcgtatttctcacatctactacaaataatgtaaatttatataattcgaaacctaccatggaaatgaagttgataaattctgctctagttgtgatttgatagtgtttcttatctgtgccagaaataaattattttcatctcagtttcgtctttgaagataatttattacaacaaacggagagaaaaatcagaaacgagttaaacaatttgactactattcaattatctttagatttcttaattccaacggattaagatatttttctgttattattacgtcaataacccgtaaactcttctacccttattctttcttttgaaatttttaattcttcctgcaacaatgactgcatagctttcaacatgcttggaggaccgcaaatgtagaatattgaattgtctaataaactattgtcgaggtattttaaaatcattgtcttatttattcttccatactcccctttccaaccatttctaacatttgattgatcattatcatcatgtttgtcttcactaacagtatagatgatcttcagatttttgtttaaagttgtccaataatcaaactcttttttgaaaagtatattatccggattcctatttgaatcaaacattactatttttaggggtagttgtttatctgtagcgtactttatgatacttctaaatggagtgacaccaattcctccagagagaaacacagccggctttgaatgatcgtcatgtaacacaaattgtccctcgggacccctaaccttgactttggtcccgtcctctaatatagaaaacctctttttatatggagaatcccttatcctagttgtaaacattataaagttctctgtgggggaagatgaaatggtgaagtgcctaatcggacctttgggatcattttcaacaccgcctatgtcaaaaaaggcgaattgacctgcagtatagtctgatagtagcgttgtctggctcttttctacttgattattttgtttactaaacttaaatgacattacatcggttccctctactttaattttttctaataattctagctcagatcggggtggtaatttacctttaccttgtatcttaatcaatatgttgttaccttctatttttacctcatatgcgggttctggttcatttgctggtgggattgttacctctccggttcttacatcaaatctagatttatgccaaggacattctacttcatatccatcgagaataccatctgctagagggcccccttcatgcgtacaaatactaccaatggcatagtattttccgtcaacattcgcaatacatacactttcaccatcaacttgaacttctttcatttgtgatggggctatgtctttagtgtcagcaactctaatgaaaccttctcccattttcgatcagttttattatgcattacaatttgtatatgggttcctattttcaacatcccaaagtttgtattctataatattattatacattttaccattcttcttaatgaatataatgcattttttacggatataataaattgttatagtaaccaaagaggaagaaactaattgtctaaccattacactttatagaatcgaaattatcctgcttttattaattatgactcttttttaaatattccaattaacaagatttatttactgacctgtcattttgtttattccaaagaatagttatttatcattattcctcattaaaacaagttaataccttttctcaaatggatcagcaaacgacattggagaaatatcatcaatcaaaaccattgtagtattgaaataaattaagttgataagatatgagttgattgacagacgaagcaattaagagattgggatattcaaaacatgttaaaaatcggactcgattaagataatattaaaatttaataaactcaataactttctgaaaggaattggactcgtaatatatctattactaaacccaccggatcggtataatctgcatttggaaagtcggatctaaagtgagcacctttagattcatgttgcatcaatgcgttccttattatgacccaacaaacaattaagaagattttactttctaaagttaatgcaatattttcaatacggctttgaaattccttcacaaggctgtctttagtacacaattctttttttatgggtattgaaccagcaattagtaatcaataaacttctttatcaatatcctctaataatcctcataaaagtagaaaagtaatacgccacaaagaatattttgaattattggtaaaaccaattcaagcttgaatatcacacaaattatcatagctggacttgtttatattcatggaatggatattaagtatgagaatgctttatgggttcagaaaagtttgatcaaggtgtactgggaatacaccatgttacggccattgcgcgtgatcctcagaagaatattgacttttatacaggtattttgggattaagattagtaaagattacagtaaattttgatgatcctacaaactatcacttgtattatggtgatgagttaggtaggcccggaagcattattacattttttccgttggaatatgtacaacaaggatggagaggtacgggacaggttgatacgatatcatttacgattcccgaaaatgcaatagaatattggattgccagatttaaagataaaggaatatctcatagagggcctgcaatacgatttaacagtgagcaaatcataacatttgttgatcatgatggattaaaactagagctggtggccaataaagaagcagaaaatagaaaaataaatacatggaatgggggtcccatatcaatagagcacgctattaggggtttacattcaattactcttactctagaaggatatgaaaaaacagtttcccttttaacccaaacacttggattttctagaatacaaaatgaaggtaatagagttcgttttcagattgatgatactgttagaggagaaaaagttcaaactacagttaattctgctccttcaattgtggatataatatgtcacccgtatagccatcgaggaacaagtggtccgggaactgttcatcacgttgcatggcgaacacctacaaacgaaaatcaagccgaaatacgtaatcgaatagttaaatttggattgaatgttacccctgttattgatagggtctactttaattctatttattttcgagaaccaggagatgtattatttgaaatagctaccgatacgcctggctttctagtcgaccaagaatctgcggagttgggaaataaacttgtattaccaaaatggttggaacctaaaaggatttaccttcaaaagacattgccttcacttaagataccttctaatgaaaacattggccctgaaacgaaataaaatgaaaactaataaaaatatcaaattgaatactgaatactgaatatttatattaaaatagcagtcaatattttttcgaatgtttaaaatagtatggttgataagcaaatgatcaacaattttgttttaagttcaattgcaattcgcaaccagttaaattcatactaacaggtaatttaattaatgtatagtctaatatgtattttgagaattcatcttcattggctttcccttgagatttgtacactttaatctagtcccaaataagatagagagattattccttcgtgtggaaaacctgaagagatgataaagtttggaaaaactgtgatagtcttttagatggaacctggttgactatcaaagaaattgctataatccttttattcgaaaaggtgaatcttactttcggtaaatataacattcgtagagttataatttaccctcttgactcgttaccagactgacttcctcctaaatattttaacctattttctaaatctgttcccataggatacattttgtcattattcgtatactcataaagatacacctgaaaagttttacaattggggcaatattgataatataacctatgccataattttgtatcttcattagattcagggttattatgccttaattgagggtggaagtgttctttacaattctggcattgcatggtagtattagttggtaatattattaaaccgttatgtgcgttgcgggattcaatgatgacctgctaaatcgatatgaaattgagtttgaattactctattactttaattatgcttatactaacttgagcgaagggacttcatagcgcccgcccaagcaaccaactcatctagcagagtgttaatcgatttctcgtgaatatgatggggtttaaatattgaaaagttttcaaaatccgtatatagagataattgcacttgagctcgaacagttgcaattttaacctctgccataaccaaacgcaattgttcgactgcacgtacacctccagcgctaccataactaacaaatcccgcgactttgttgttccattctttaaagagaaaatcaatagcattttttaatgcaccggggattccatggttatattctggtgtcacaaacacatatgcatcgaaagagtcgatttttgcagaccaaatcttggtatgctccttagaatactgacccatagaaggtggaatcggttcatccagtaatgggagactatagtttttaatatccaccagctcatattcggcgtcccctcgactcttgactatctcatatacccatcgacttaccgcttcacctttacgtccaggcctagtactgccaataacgatggcaatctttagtctttggtcattcatatagcagttaaaccgctgcatcaattatagtttatggatgaatttatgataatctaatccaatcataaatgttgaattatatattcatgtatatgacctgtttcttacaaaaagacctatcaattgtgatttagaatatcaaactaaataatctgttatatacgtaaattagataatgaaaaatattgaattggtcattcgaagattttgtatatagggtatggatagaatctactgttacctaagatatttcaaaaaatacaatttatggatgctaaaggattatagtttttggttatatctatattcaagatacgaaagttctttatcagttgtaatgaattgtaaattgatttctgtaaattgtaacatacgattatctactatgtaggctaatgttctgttaatttgacttttagagagataagttaaagattcaaaaatttttgattttgtgatgccttctttagagatttctaatatctttacgattaaatcttctttaagagacaataacaactagacacaatcacgactaaaatatgtaactaaagggaaatgaatgaataacctgcctatctaatttcgattgcacataattacacaagtccatattctaaatcaatattaattctatcaatgattcattcagttggtgaatggcagaatcagattaaaaaaacttaaaattcaaataatcaaaagagaatcggtattcccagtcatctcgtattagaccaccttattaccatctatcttccatttatgagggattatcaaattcttaatacaagtttaatccaacctttatcttcccgccgaaagaacgtttattttttatgatgtccagtttatggttttattataggaaaagggttggaaggggttaaaggtattgcgcctactttaaagtcgagttgcctcctcccacataattgaatgctataagcgcaccagggctccacaaagttgtggtaggtatgatgggaccgtctttcatagcttgcacagggcctgccggatccgtaattacataaacggtactaccatcagggctaaacgcaatatctcgataacggttctctgagcggaaaagctcttgaggtttacctttgactgctgtgccgttgtcgtccagtgttattttgatgatctttcctcccttcaatgtagtcattaacaagttattctcccaccctggaatagtatcagatgtataaagacgcaagcttgatggtgcaacggttggataacacgtagaggtcatctctccgcatgacttacctgcctctgtaaagttaaagcctttatctaccgtgtaaaacgtttgaattggagggacgaaatttgttgcattgaattcactttcattttttacagtcaccccaacaggtgcaggtgctacatcgttaaactttaattctggacaattctttgcagcagaccagttatagtactgatacgctttgtcgtcaatatagcctgagacataaggccatccatagtttccacctgctacaagacggtttatttcgtcatcagaattatcgccatgctctgaaatataaatatcgccagtaggtccaactgctataccttgagcattacgatgaccatatgtgtagatgtggctttggactccattaataacaggattgtcttcaggaattgagccatctggattcatacgaagtactttaccttcgtatgtactccagttcttggctgccacctcttcagccgttggaaggtgttgtgccatgttgttcaagcaggccaaagctagttggtttttgccctgatctcctatggtatagtatagcatgccatcaggtccgaatgtcatacgtccagagttatgatcactacttcctgataaaccactaattatgtctagtggctcgctaatattgtttgaggatggatcgtatgtaaatcgagtaattttggttttgagctcaggtactccttcaccttgactacccaaattgccctcataagtgtaggcaacgtaaatataatgtgtgctattgaagtttgggtcaaatgccattcccaatacaccatcctgacctttagattggttagcgtttgggataggcgtagtgctaagcttgctaccattagttggatctactcgtacaatgtcctttcctactcgttctgtgatccagagcttatcgtcaggaccatatagaaggtttagaggagcgctaagatttcttgctatcacattcactgagaaaccctgttcattcaaaagttgttcacgagcttgttgttgtgttggtgttaaggtttcattatttgctaaaggaaatggatcttctccctgtgccaatactgtttggacaatattggtggcagtagtagtagtattaatagaaaacccactaaacatggctggaactactgacaaaattattagtccaaacaatgttactgtcacaatataacgtgttgagttaaattttgaatttttatggataaacattacaaaaaggtttgtcataaaattatataaagatctatacttaattcttgatattttttgaatcatcatattaaaatacaaatctgaacaaataaactcattttttatgtagaatctctaactattatataacttctatggagatataagtaatactatgattcaaaatattaaggattatcaaataaaaaacctggttaaatatcttgaaaaaacattattgtttgaaaatgctgcaatagaaacattgtcaacctgaatcaatgaaatcgttacgcatggaataagtcaaaggatgatcctaaaacacacatataaaaaaaatagatttgaataaataattttaaaactggatgataaaaccttccattattctagtttaaatttgtagcagcgtatccaatacgactcgcatactaaaaaatagttttcaaaactcctcaaagtcgttagacgataataaaaatatacattgatgatatcaaccttcaagtaaaataaaattaagtttaataaaatacttttctccttttactccttaactactttaccaatacttgattttttcaacacaaaaagtactgtaaatcttatgaagattagatcttaaagtcagaatctttataatctattctttcgggtagtatttcaaaagagggtttgagtttttcaaccaaaccagataacaggtgattttcagattgatagaacttatccatatctccttaggttcccaaaaagtgagcacaacaagttcagaagggtcttctaaactatccattactataaacctataattttactttcttgtgtttcaattcctttgaaaaactccaaaattccgttggtactatcgtctcttttaccccgttttaccataactttattgtattttacatattgcattatcgttttgttattcaaacttcaaaataactttagcttagatttactacagtttatcatatatgctaccttgacaagagttggttagagacaacacaattgtttataattcttgtagtttgaacaatttttttatgattagtattaccatgaagttcgattgaacaattattctatcttttctttcagaactatttctatgatatattcttaaaacgtccctccatgataatctcttttagtgactttctatcattagggtgttcgacctgttgtaactttggaggtaatttttcgataggtcctctcttacctattgcgatcattgccatgacgtcaaaattatcgggaatattcagattctgtctagctttttgatagtcaaatccttgcattccatgtgccacaattcctctaattgacgcctccaaagccagattctcccaagcagcacctgcatcaaattgatgagttattgagggtttttcattatattcaaagttctttcttgatattattactaccaagactccggcatctttagcccagatcctgttaccctcatttaataaatctaaaaatttggaccattcactacccgttcttttagaatagataaatctccaaggttgattattaaaggaagaaggagcccatcttgcagcctcaaaaagactcatcaaatcatcatcgtttatttcttctcctgtcatagaccgaggagaccaccggttaacaaaaatggaattgatattatgatcagctcttctcatattttctgattttgtattagacatgaatagccataagaaaagtattataaaaactatagactgatttggttattattaaatagaaaagaaaaagaagaatatttaacattcgcaatttttggttgagaatgtaagatataacagattagaatttgcaaaacaaaatttgttaggttttatgattaaataaatcataatcatcatgtagaataagcacaaaatgagtactttgaaatgtcagattaagagaaatagtaatgaaaagtagcctaactttcgaaaataataaattacacgaatctgactgggtataattcaatatacctcttttcttattgatacttatgctcgaccatttatctaccaaaaggattgattggcagaaaccgaggaaagaaggaattacttatatcgtagataaatttcaaggatttgatagtgcgaatttcagaataatttctccgctaatagacattgtaaaaatttatggtccactgcccctcttgatttcaaacgatcaacttatggaacggataaatttctaccatgaacatgacatattggtttccgttgggagtacactcacagaatatgctctgttagaaaaatcatttgataaatacattgaagatgcctcaaagctggggtttgacatcattgaagtaggtgaaaataatattgaattatctctagaaaaaaagaaacagattgcagctaaattaaagtccaaagacttggtggcactatggaaagtaggaaagaaagatccaagaaggcaactttcgtttgatcaatcaattactaaaattaatgaggcaatagaagtgggttcagaaaaaattctccttgaaggtaatctgggatatgccgtaggcatatacgacgaaaaagggaatattaaatggaatatagttggtgcagtaacgtcgaaaatatctccaaataagatcatatttgaaactcctttggaaattcaacagtcagcaatgatcgctgaattcggtcaaagggtgaatcttgctgaaacaaatttggagaacgtaatatccattgaatcacaaagaaagggattcttatcccgatctagttatggaatttccagcatgaaaaaaatagccaaaggcagtccagctacaaagttcatttattatatcattcgaactcgaaattctatggaacaaagcgaattaattaatattactaatttaccccgtagaaccgttcaaacagggttggaggaactaaaagaacaagggctaattgttgaaaaatctaacctagatgacgtaagaaagaagatatatcatatagtaaaagatgaatggatatgaaattaggacaatcgatcaacatatctatatacaagatttccaatttcgatggaaaataaaacattaaaaggaaagcgggatgaatgtgaattaattagataaatggtgataactggaattgcttcaacatctgtatttgtaaaagatcagcaggagtctttgaccttttgggttgaaaaggtaggctttgaaattatatgtgatttggaattggaatcaaacttcagatgggtggagattgccccaagatcatcgacttcctcgattaatctatatccaaaatcattaatttctaaaaaagatctaaaacccatgcccgtgataatttttaggaccgatgatattcatggtacatttaataatttaaaatcgaaaggagttactttttctcgtaatcctttaaagtctattctaggaattcatgcgatgtttaaagatgtcgatgggaatgactttctaattctagaaaaacataaaaattgacttatctggtgatgaattaaaaatgaaatcttttgaacaatcattcaaggtcaattgtagcattaataaagtttggaagttctatactgatatcaagcatctagaaataattacaccacccaacctgaacttaaaaattattgaaacctccgataaacaaattatcaaaggcctcagaatgaccatatcaggcaggttattcctttataacagcaaatggaattcaataatatctttggttgatatatctaggcatatgtatattgatgaaatggtaaaaggaccattcaaaaaatggaaacatgtacatctattttcagaaattgaagaaaatcaaacagttattacagacaagattgaattcgaattgccttttttctttttaggaaaattaatggaaggttatgtagaaaataatttaaagaaaatttttgaatttaggaaaattaaaactgtacgctatttatcgaataaatatgcaggtgagtaggcattatttccaataggcaagatagataaactactagtaaatatgatcaaaatagggaaaaattaggaagattttactgcatgaataatacaaaaaataaaaatattattttttatgaaaattcattgtatatgcctagtaaataccaaccattgttagttggttcctttttgatttttactttacttattgctaatgtgtctatatcatacgcgtcaaatcccatctctacgattaactataatgattcctcaggtactattcaggcattaaagaattttgctttatccaagataaatgaggatcgtgcaaaacatgctctttcgccattagtacaaagtaataacacagctgcccaaattcacgcaaatgagttattacaaactaagaccatatctcacatgagcctggatgggtttaaaccctacatgttatattcattgtataatggtactggctatgttcagcaaaacatagggcaaataagttatgtactttcaaacaatggtcaaaattactacaaagcatctgatttatgttatgatttcaagcggtattactgtccggtacttgatcaatacaaagcaattaatgatttggaatactccatgatgaataatgatgaggcttgttgcaacaatggacacaagaataatattttaaacaagtttcatacccatgtgagcattggcattgcatttaacaaatattattttgtcatggtacagaattttgaaaatcactatctaagctccgattcttaaaatcctaaaaaataatgaagatataatattggaagctaaaatcaatgatcaaaacaaatttaattttgtcataaatcatgtttcgttcttcttagacgaatttccaaccaaactgaattatgaaaaaaatagagacaagaatagttatgattttggagatcttaaattaatgatatctaaacccttaccatcagacttgcaatatattcaggaaaaaaaagatgattcctacaagataattgaagcaaaaaagtgggacttgagtaagaataatattgacttggaatttcaacttccagatactctaaacacaaaaaacaaaatcttgaccatggttgtttatgctcagaaccttgaagataatcccgaagctaatcaagatgaaaactatcttaatcctgaatatgttcctttaacatcatacactttttttaactattaggattcaaaaaaagcattggtaccagacaactgatttattgtttaccatatttcaataattaatttttacaaaaacatacaccacgcttcttcttactctccttttcattggtttcgaattgaaagggtgttgaattttatactttaaatctagatttgatttttgatactaagatagatccagactccaagatactattttaaaaatgtttaggaattaagatttgccaaacttgtgtatggacaaaatccctgataataatcctgtaagtcttagcaaaacaacctgatcgaatatttctttagtaaggtcttgtaacttttcatcttcatgtacattaaagtctttttcatagcttcgttctatccattgtagtactttcttatccaaatcagcaacgtccttatctccaattgtcgagatcacattgccttcgatcaactgtcttataaattcagtaactgtccagtattggaattcaattagtggatgcatactaggtataataaattttgatatttaacacttctgttttatactctgatttttactttgacttgtatttggaaatatgagaaatctaatttgaaaaaccggattcaaattgtaaattcctttaagaattttcatctttttacccaatttgtcaataaataaattgagtcaatgccggttgatttaattttccggtaatagtaaggtatttaacatcattattgtagatacattaggaatggatctatcctcaaatcaaaattaaagaactatattgaatattaattcttactaaaatgaaaaaagggggacggatgaactatatttgtcattagataaagttaatgaacaaatcactttatgcagccagtgtccgcgtctactgcaatatattcgtaaagttggagactataggccgcaaagatatagtggttatacatattgggcaaaacctgtaccgtccttcggtgatcctaaagcgagattattgataattggtttagcaccagcagccaatggtggtaacagaacaggaaggatgtttacaggagatagctccggggaatggttgatgaaagcattgtttgaaactggttttgctaatagcccccacagtgtatctgttgatgatgggttgctcctatccgacacatacgttacctctatagttaagtgtgctcctccaacgaacaaacctactaattctgaaatttctaattgttcacgatttttaagaagcgaattaaatctgttaaaaaatagtgtagtcgtagtcataactttaggcaaaatggcttttgatacgtattgcaaattgaatgatatgaggggattgtacttcaaacacaatagtgtttaccaaatagattctactaagactctgatcgtttcgtatcatccaagcaggagaaataccaatactgggactttaacatggcctatgtggattcaaatatttgaaaaggcgaaatcgattattgagaccaagttataggaacacatctagtcatcaataacatatattttaattattgacccgataattgtcaaactcgatagcaactttatatctgtataaatctttgaatggactaaaatgacaaacaaataataaattccaggtaaccgtgaatccttaatttacctatttattaacccctcaagacattttccaaagtatttacttatttgattactttggtgagtatcaaaaggcttataattatcaagatccaattcaaaatacatataatttttatcctaaaggatatttacgcttgacccaatctatgatggacccatcgtacagtcttacattggcaaaacctgcttgttttagttgcaaatatgtatgtgcagctcgaattccagagtgacaatagcatattatttgtttgtcctgggtgatacctattctttcgaaatctttttttaacacttcaacatccttaatcattttaccactgtctcctattccctcatcataattgtgcaggattgagcctggaattctcgcgtataaatgctcttggggggtgcgtgcatctatgatgatagtttcaggcttgtctttctcttcaaaaatgatctgtgcatccgctctctcagtagctttaatatgcgcaataaatcctctgtctggttttgtcgctgtattatttgatctaaagtcttttgtaacggggtatccactttgtaaccagttttcaaaaccaatatctagaatctttacattcctgtgaccaaaataaataagtgtccaaacaattcttgcgagtgaaggatctgggtattcaccatacacgataactactttggtgtcatcaatacccatgtcagtaaatatttgttctgcggcttggggcgtaattaccagatgagccccattttcatcggttgatatcaccttttccacacccatcggcatagcattcttaatatgactgaatctaaagggcataattcccctggaatcaattattatcaaattttcatcgtctaaatgtaaagccaaccaactggcgtctattatcatattcatttacaaaaaatcatgtatatttgggtgaacgtgttatatttctttaatgcctaaattttctaaaatcttgatatgatttttgtgcggtatacaaataggttttatatacgtacttactaatttttcgtatatccatggcctcaggtaaatatgatgaaaagtcattacctcctcatggttttcatctgcataaaaatacgcagatattatatggagctgaaaatgcggtaggaaaaggcgtagaatttatgaaaaatgttaaacataagatggatattacatttgatcatagagctccttcgatagttattgaaatcccacagtactacaatggctacggggatattctaaaaaggggaggaaaaattagatgtataaccgaaattacaaaagaaaatctacaatattgcgaagaattagtgaaaactgttactgaattaagacatatggatggtcttaaaggcggaattgctataaatgaaactgagtacatggctactacagtccttcaagaagcacagccattaactgaggtaatttatagcaatgtcgacgaagttgttgctcaggggcaatttatttttgatactttatggaaaaatgctacagttgctcaaaagaagatcaaagaattaaaagaagggatcaaatcttatgaaacaaaattaattacagaatctagtgattcattaatagaaactgagtttgggcgagtagtatggaattcttctgaaattaatgtttgtacatctattgacggtttaaggattaacaaaaattatcttgtagaatccataataaatgcattaacaaatgaggggaaaaatacacacaaacgaataagaattctagttgagatcactagagacaatttagagatagtaaaagaattactagatttaggaatacagattagacatatcaaagatatatcttctatcgattatactgtcactaattcggatcttattatagcagttaagagaacggaaagaaatgatcctaacaatagtattttatatagtaatgatccctcatatttagatcatttctcaaatgtatttgaagagctgtggaagagtagcaaggatccagaaagagtcataaaatcattagaagaggaaactgaattatcttttatagaaacgatcgatgatcctgaggagtcagtgaaattagttcgtactttgatatcatctgctaaatatgagattttagctattcttcccaattttaattcatttttaagacaggtcgaatcgggaatgatggagtttatgaagaatatctctatatcaagaaagaatatgaatatcagaatccttatcgtagaggaaactgataatgaaatacagcacaagattttgacaatatttgacaaatttaatggaaagattcccggcatttctaactctgacgagatcccgctggaatttaaattcaagggtgttgagaatttcaaattgaaaattttaaacagcaggttatttaccgagataggattcttaattgttgataagaataaatcattgataatagaatcaaaaaacatacctgcgattgatatgattgagtctatcggactttcatcatattcaaatagtcccagggtttctaaatcatatgcgtctatatttgaagctctttggaatcaagctgaaatatacgataaattaaaagtacaagacagactacaaaaagaatttattaatattgctgcacatgaacttagaaatccggtgcaatcattgttaggatattcagatatcttgatgaatacccgaggaaatatcgacaactatagcaactttatagttactataaatcaaagcacaaagaggctcgcacggttaattgataaagtattggatgttacgcaactagaaaatgaattattgatactgcataaagaaaatttcagtttagagaaacttgtaatagaaattgtaagagaatataatagtaatatacatctcttaaataaaaatcaattagaaatcaggtacgattccagactcaatgattgcaatagtactaattctgaaagcagaagaaattttggatatgtgtttgcggatagaacacgaattattcaggtaatagtaaacatcttagaaaatgcagttgaatttacagacagtgggacaatcactctgcggttaagtgagaacaagacaaccagtgagattttattgactattagtgattctggtcgcgggatagatccagaaattctacctaatctattcaccaagttcgtatcaagatcacgcaaaggaaccggattaggattgtacatttcaaaaaaaataattgagtcacatgagggaaagatatgggctgaaaattgttacgatggaaataacaagattgaaggatcaaagtttacactgaccttaccatcaaaaggcaattaagaactttataattatatcgttatcaggaaatcatggataactaattagaaatcctgttcctattgtactttactagagccaaatcttggatatttcgccaaggaatcaaatgaattaacacaaatgataggacttaatatttttgatctattattgtttaaataaatctaccaaaaagtaagagggtgagttaaactttggttgggatagaataataatgccctcaaaaatgagatttgtttcataattgactaggtcagatcattcctcaatattatacgatatcttgctttccctgcctctagatgttctagggcttcattcactttggacaaggggtattcctcaactagtggcatgatctggtttcgtgtacaaaaattgagcatactcaagataaccgcaggacctccagttggggaggctcctattgatctttcatgagaaatcaaaggagacatcgtagcccttacctgagggacggctccaactatatgcagtcttcctcctggggcaagagtattgatataggcatcccaatctatctcgacatttgcagttacaagaatcatcttaaatttatttgctaatgaattcagatttttcgtattatttgaatttataaagtgatgtgccccaaatttcctagcttctttctcttttttaggattagtagagaaagctgtaacttcacatccccacgcattgagaaaaaggagagccatatggccaagtcctcctattcctactactgcgacatgatctgtagctttgatcccattttgaatgatgggactaaatactgtgataccgccacaaaagagtggacctgctgttttaatgtctaggttatctggtagtggaaaagcccataaggcttgacagcggaccttatttccaaatccaccatgtctacccacaattacatcttctccagttaaacatcggttatgataaccactcaaacattgttcacaggtctgacatgaacgagatctccatccaactccaactcgttgacctgtttttagatgagttaccatttttccaacggatgaaatttttccaattatttcatgtcctgggacaaatggatatttggtgatcccccattcattcttgagcatgtgcaaatcgctatggcagattccacaatactcgatgtctatgtcaacttcatcaggcttgagtggtcccagctcatattcaaaaggctttaattttgatcctgatttagttgcagcaaaggcttggactttcatgatagtagttggcatatattgtataaataaataatcgtttgcctatttgaaagtggctttgcatcatcataaaaattaaaattttggaaattgcttggtataatgacatttacacgtcttaaataccgatatcatgtcctaaaacatcttttaataattattcaagtctaaaacttgctaattcaatgaaatcttaaaatctatagtgaaaaataaaggtgatattattatatatttagatatgttatccaccacggagaaaaaaatttctagtattaagactgtaggaattttgatatttaacgatgtagaagttttggatgttgctggtccatttgaagttttttcgatgacacgtcttgatgaaaacaagagatatgaaaccgcatcaccttttcgagtcgtgctgttatcggaaacaaaaacacctatcattgcaatcggaggattaaagctccttccagattttacttttgatgattgtccaaatttagatttattcatcgtacccggcggatggggcacacgtagagaggtaaataatcttgtattgctccaaaagatatcaaaactatctgcaaaatctactttgacagcatcagtttgtacgggttcaagtctaattggtagggcgggacttttggatggaaaaaaggctactactcattggagaacatttaattttctacatgactctgcacccaaagctcaaatacaacaagatgtgatttttactgttgatggaactatatttacttctgcaggggttgcttcaggcatagggttatctttattccttgtcagtcatttttttggagcacatgttggcaaagagactgcgcggttccttgaatttccatatcctgagtagtttagagagaagagggtcatcaaaaaatatcctaaaggatcatcaccaagtgagattctagattttctagaggcgaactcatataatcatgatcaaattttttaacaatctcaagccgttttgttattttaagttatatgactattttcatttatctacaaagttctagaatttctaacactattttttacattttcttatggggtgaagcaaaggaacaaaaaatatcatgattaaatagcaaatcatccaaatatagttaggaaaatggagagttcttggaggaaaagggatactgggataacaataagaataattatttgcttgggcatattggcctttttgtacattgtttttatcacggttttggcttattttggcctgggtttttttccaatagtagtaatttcggcagtttttattttgggtcagtggtttttttctgatagaatagttctttggagtactggagcaaaaatagttaccaaggaacaatatgtaagtttgcactctatggtggaaaatatagtgtctaataataatttgcccaagcccaagattgctgtagtaaacaaccgaatccctaatgcgtttgccacaggaaaaggtcatcgcagttctgtggttgctgttactacaggattattagaaatattagatcaggatgaattagagggagttttagcacacgaattaacacacataaaaaatcgagatgtaatggtaataacactcgctagtttgttttcaaccatagcatggcaaatgatgcaattcggattttttggaggaatatatggtgcaggaagggatcgcaataatggaagctctatgataatcataattgttgtttcattagtaacttggatagtgagttttctaataattagggccatctcgcgttatagagaatattctgcagatagaggtgcggctcaaatgacccgaaagcctgtcagcttggctaacgcattgttgaaaattagtggaactatgcataaagtgccagcaaaggaattaaaacacatagagggctacaatgcctttttcataattcctgcaatttcaggtgacactcttacgcaacttttttcaactcatccaccaatcgaaaagagagttcaaaaattgttagacatggagtcatctatgcgtcgatattaatgctcataaaaggtaggtattaatctaagatgaatcaatttttgaatttgtcttcgatttattcatttgaccatatagataaggtcatgaattgtacttgatgactatagtgaaaataatgattgatgtatcttgttgcctttaacttccaaccttggttagggcttttcagtcaaacgatattaggattacaaataagaataaagtgttcttttattaaattcggtggactataattccactttcccgaatttgtttgccacattcttatacatatctatttcctgttttgacaatggtcttatttttttcatggcatcttcaaaatgcttcatatttattcttaattcctttgcttgtttctctgcctccttggaatctggatattttgttatatgttctcttaatgccaacatgactgctgcagatgataacgaagcgatatcagctcctgtatatccatcagttttatcagctaaatcttcaatattgacatcttcagccaacggcttcttttttgtatgaatcttgataatttgaagtctggattcccgatcaggtgggggtacatatagaattctatcaaatctccctggccttaataatgctgggtctattatatcgggtctattggtggctccaattactactacattcgttagtatttcgaggccgtccatctcggtcagaaattgactgattactctctctgttacatgggaatctccatgatctccgcctctagttggagctatggcatccagctcatcaaagaaaattatacatggcgcagcttgtctagctttcctgaatatctctcgtactcctttttctgattctcctacccatttgctaagcagttctgggcccttaatacttatgaaatttgcttcactttcatttgctgctgcttttgccattaatgttttccctgttccaggtggaccgtataacaaaattccttttggaggggtggcatctgcataggtaaaaactcccaaatattttaatggccattcgacagcttcctgaagctcctgttttatggtggaaagtccacctatatcatcccattttatatccggtatttctacaaacacctctctcatggctgagggttctgtttccttaattacttccataaaatcctgcattctaactataatctttcttaaagtatcaagtgggatgctttcgctagagagattcatatcgggtagaactcttctaagggcgcgcatggctgcctccttcgcaagtgcctgtaaatcagctccaacaaaaccatgggaaatatcagctagtctttgtaaatcaacatccttatcgagtggcattcctcttgtgtgtatttgcaatacctccaaccgcccatccctgttgggaactccaatttcaatttccctatcaaaacgacctggtctccttaatgcaggatcaatggcatctactctatttgtagcggctattaccactactttaccccttgatttcatcccatccattaaggataacagttgagcaacaatccttctttcgacttcaccggtaacttcctcccgttttggcgctattgagtcaatttcgtcgatgaatattatagaaggtgcattcttttccgcctcttgaaatacatttcgaagtctttcttcagattcgccgtggtacttactcattatttctggtcctccaattgtaaagaaattggaatttgtttcgttcgctacggcttttgccaataatgttttccctgttccaggtggaccgtgtaacagcaccccctttggcgcttctacacctaatctcttaaacaattctggatgtcttagagggagctctatcatttctctaacccttgctaccgcatctcccaatcctcctatatcctcatatgtgattgatgcagtcgtaccttcttgggagatctgaacagcttttgaagactcttccgaaactactatctcagtcgtatcactaattatgactgggcctgatggatgtgtagagatcacaaccagatctattcttctacccattacattgatagggactgtatcacctttagtcatcaaagttccatttagatattctgcgagatattcttctgcacccattattcgcaagggttcagtaggagcaaatgttatatcttttgctatttttgattctacaactttgatttctactaagtcattgacaccgacatccaacctatttcggataaatccgtccatacggatcaaccctttgcctctatcactctccttagctggccagcttaaaacggtagtcttcctaccaatagatgatagttctagcgcatcaccgctaacaatgtttaacgactctgcaatatcgggatctacgcgagctatttttcgtccaacatctctttgttctgcttcagctaccttcaatgtagcggtttttgacgatttggtgtcatcaacctttgctgtcatactaatctggtatatgattcatactagtattaatagtgaattatttttggcaacatttttagtccctaaagtaaaagtctatgcaacctttttcaaaaaattttcgtactcaaatttctaaatttttttaatttcttaaaattttcacaaaattttccaaacttaaatactacgtacgttcgaaaatatcttagtctttactaggtcaatctacgatagttcgatcaaaacacaaacaagaaaaacaacataataacaggatataaaaatttcaattctattacaattcgactaagactggctagagaggacatttcagtatataaaaaaaagacaggaccaaagaaaaatttgacgattatattccatgtagaatgaaaaattatcaaaacatgtacaaacctggatgaatcgatttacatatcaaaataattggggagatatgtcattaagatgtctcactagtaggtatggaaaagaataagtaatagctatctttaggtaacctgtattgctggcaaaaatcactgtgcttcctttattcttgcttttcttttcttttcttttctccggtaatcttgggacaaacaaatgagacaaaaaccacctttcaagatccgcgtacaggaattactcttcagtatccatcggattggaaggtaactgataaagaatacgctgatgcgatctttggagatatggatggtgtggataatgggttgaatcaaagatcctaaacttgttgaacctatttttgttactcccagaatctctggatggatcttcatttttaattttgtctgagttacttcctttccccgtgtccattgaaaaatataccgaattcactaggaattcattactgtctgatcctacaatcaaattgtcaaatagccttccaatttcactcagtaatatgagtgggttaaaatataatgttacctctaaaagcgatccgtacttacaaacacaaattttatttgttaatgattcgaatgcgtttgtagtaggctatacagttggggaaactgaaaaatcgcaaaatatcatggatattaactctatggttgattccataagaattgactaacaatgtcttttccacttattttttatcttagtaaattatttatggagaattgattcatattgcataattgccttccaagcttaaaatcaaacatcattgcgtttcggtatttcaaagatattcggacaaggattctcttgcatcaatctatgatttattctatcgttgacaatttttgaaatataaacatgcaaaaaattttgatattagccgatgatccgataaggactaaattagaagaaaaattaagacggcgatttgatgtggaatctattccaccccctttaaatagcatatgtgaaatcaaaatgcgcctccgtggaaactggatcacattatgtagattttcaccaaatgaaaacttccgcgatataataacgatgtttaacgtaaattatgatttaaaatctcgaacaacaaaatcaatgtcatagaaacacagacgcctcttcttcttattccttattttctctattatatttgaccttttgtcttgtccttttattttcatatacaacatagtcgtagcattttgtctataatcaaaataaaaagggaattaaaaaagctatgaattactaaattcaggactctatgtgataggcttgaaataaataaagtacaaaaatatgtttgtacctctactagttatatgtccccatcatcgattctaatgatcttacaatatttacaataatattcgttcttttttatcaaatccatttttctattgcagcggttacatcttgacatttgttcttttataatacgatgctgaatcctcttcaaaacaaaggggatgataaaacctatcattatgtatcctacgacgcgtgataatacgccccttctctgcctcccagagtttccgtatcttgccatagttcgatttcttgtacatattagtaatcggtattgaataatcttttgtttgagatgagattaaaaatcagattgaatatcatgtgaacttgtttaatattgcctccgaatcaaaccataatgcaattttattaatgacacttgtatttaaagccaaaattatagaatatcccttctgaattatttaattatgacatggagaattagatagtgctttataaacaaatatggcaacaaactttctccaagcaggttagcatatgatcatgacaattgtgtctgctccttggtacagatttagtatgattgtctaaacctgtttccaatatcatagtatcctgttgcttgtaataatataatcaatacctagaaaattgaatttgtctggttatgaaagaactagatatggtggggtctaaaatgacaaattctggaataaaggtcgcacattaagcatttattaggtctgaaataattacttcactttcattctaaaaaaattctaactcaatcccttaatttctctaactcggtcttcctattaggttagtatctttggtcaataatggtaaatggctctttatcaaaaggattagacaaattattaataccttgttataagaaaatatacactatagtcgatatttgtttgcaatcttcaagagtacaactataccgaaactatctcaatgtcaatttctatgtacaatccttatctaacctattgataatggaggctcggcctgtataagcaatcaagtatgtatatattaaattgaaaagatatattactttgaaaaactggttggatgatgctaattattacgaagtcttggagatatcacgatacgccaatcagagggatataaaaagtgcgtttagacgacttgcaaggagataccatcccgacaggaattcaacagtttctgatgatataatgaagaatattaatatcgcgtttgaaattctatccgatccaggaaaaaggcaacaatacgatgaatctcttgctggtgagcgtccaagaaaattagaccgttctgatcaaaatcatgaagataattcgacttctgatcgatataattggaaagtagatactatctcagacgacttggaccgtcagactggaagttacgacaatgaagtcaacgtaaattttgaaagtagattaaatgctgaacatgaggctgcgttgttagggaaggatacttctttattagaaagtcgatatcgtataattatagagccgtcactctgcttagcattcggaagttgtgaaacgcttgctccgaaggtttttgtagttgagaagaatagacatataaatccaaaagcgacagttatatcagaaacagccgaagattttgaaactatacttgatgcagccaaaacttgtcccactaaggcaattttcatcattgacagatttacaggcgaacgcatttttccatagttttcacataatgaacatctagttccgctaaatgatcttttttgtcagttgttctgtgagtagaaataacaatctgtttcagcaaaatctaatttatataagatatttgatttcgggacaaagtgccactatcgttggtgattccatatggttattgtgatacatgtaagaacttatctccatgaccaccagtgaactttgcttttcttgtagatttcctttaatttacctctcattgaaccccaagttaattaacatttttattattttgctcatcataacagtgagactaaattagttctatctcatactgcaaataagtttcataaaattatttatcctataaagtattaaggttgttgagggagaagttctttgaatgatgctactatgaccgggagaattactgctgaatcagtcgatcgagactttatgcaaataaggtatactgatcttataggcaagtttctcgcaaaatatattcaaatcgataaagagttgattcaggatgtttttagaaaggggatagggttggatggttcttcagtaattggtttttcaactatagacgagtctgatatgatgctgtttcctgatagaaaaacattaagaaaaatacctttgtcaagctatgaaataatgactgttatagctgatgtttacaatggatttgatcaaggtagatctcgaaaagatccacggagcgtttcgcaaactcttgaggatcaccttgccgtgagtcaaattgcgtgtcaagtaggtgctgaggttgaatgctttgtatttgatcaaataatctttgatatggaaaagaatgaccccgcaagtaataatgtaaatggtcggaaccgtgcaaaagatgtttcaatcttatcttcagaacaatatggaattgggaaatatcctattcgtaaaaaatctgggtacgatgttcctacttttcaagactctctgattgaatttcggtttgaggtagctaatatattgaaacaatattatgatattaatgtcacaaatatgaatcacgaggtggctagtagtggccaaattgaaatcaattttatgcatgattacttgactcaatccgccgacaacgttcagatttataaagatgtggtcagaaatgtggcaaaaaaatacaacaagattgcaaatttcatgccaaaaccaatttttgatcctctgaacaatgaaaatagtgataatggatcaggtatgcacgtaagcataagcttatggacaaaatccgcaaataagaatgccaatttattttatgatgagtctgatgattatgccgaattgagccaaactgggcgatacttcataggcggtattttagatcatgctagatcattatctgctatagtaactccaactgtaaattcgtataaaaggattataccaggatttgaggcacccgtctatattgcttgggctaggggaaatagatctgctgtagttagactcccagtcaacgaaaaaaagagttcgaactcaaaaagaattgagtaccgggcacccgatccttccgcaaatccctatcttgctttctcggccatagttgcagcaggattggacggaataaatagaaaaattgaaccagggaaccctgttagtgaggacatttacaaaatgtctgactcaaggaggaaggatcttggaataggtgttttacctggtagtttggaggaagcgttatcttcgttgaaaagtgattcaaattatctaaacctttgttttcaccatgatttaatcagtacgtattcggatcttaaaaataaggaaatagtggaaataggtaacgatgaatcagtcataaatcaattcatgttttactatgatgtctaagaatattatttcttgatcaatttctttcttatcttttatatcaatgcgctcatcttttctgttcttttctcaataggactaaatcctcaatattattggggttcatatatacttctccccgtgtagcctctttgataccgacaataggttcatcacattctggacatatttgaaaataaacaaaaatactggcacttctcttattttttccaacaagcgtattacgcatgttagaatgaaattggctctgacatgtgggacattccatattaatattttaatttgaattgtatatgtactttaacatacccgagaaataatttagtagttgattgattagtgctattattaaaaatatgttgtactagattcttgactttttttcctaacacatctaaccatctgaagctcgtcttggcgacctattatagtatcagaattgtattaaatattactgcataaaatggattttgaggaatatccacataattggttgtttgctttcattctatggttaaaaaacatgtttataacatgactgggcaaatcatggtgatcataggtttgacactaaaaatactaaacctgacgaatacattatatctaattttagaatatgtgatatgattgataagataatttcactttgcgctctcaaaaccgttctagttaccaaattttgtcttacttttgaatctcggtttgaaactttatagttttttaatcgattgtttatcctaacagtaataatacgtcaatccatggtttacttgtgtatgtcttcagtcaaacaagtattttctcttcctgttacctccataatacttgctaggatcatatatgcagtaaattggtttaatatttcttctattttttatctcatcctaaatgaatttaaacaggatgtttcgatgttgggattggtaacttctggatttctaatagggattggcctttttcagattccagctggaatactgtcggcaagatacgatgcaaaatttatgatattttttggaacaatgttgttgtctatatcttctcttctttcagggttgagttcagagttatatcaaatggtaattctaagattcctagtaggagttggaatggcatttttctttggtcctagcgttattctcatttcaaaatatttgggtaaaggatcatatgggctaggtgttggaattttaaattctgcccattcattgggtggaattattggaatatttggctggatcattattgcggaggctattggttggaggacaagtctagtaatcagtggaatcttgggaatactcagtggattgttcttgctatacgctctacagataaaaaaatatgatagctccaataatctatctaattattcttttcaggaaaaagtttcccttttttttaaattctttgacctgaacaaagaaacccgcgatcaaaagtctaaattcacaattaattttgatgccctcaaatctatcatgttgaataaacatatgatctatgtgggattatcattgcttggatttcaaatagcttggattttagtctctacttttatcattctatttcttagagtcgaacttgatattacctcttcaattgcggggctaattgggggattaaccttgatagtgaatgttatatttgctccttttattggtagaatttatgataaattaactcgaaaaaataatttcaataatgatataatattgttgctaatatgtggaatagttatttcagtaaatattatttgtttttctatgcttaatatttatttcttgatcccttcaataatgataattggaatttttgcatcaggaggatttgtaattccatatgcattggcaaggagattagccttggagaaactcggattgcctaaatatgaaattcttgctgttagttttgttaacggattatctttacttggagctttttgggttccatttgtattctctatcatggtaaaatcatttggttattctttggcatggttgtttggtggattattggttttggttttcataattccgatcataaaactccgcagctaaagtcataatcattctagtttcgagttacttctctcaaacagaatccttttgtgatactaggcgggtttttattgactattgtgaattatttatcaggaaatatctatcctttaatccccctttaaacaattttggatcttccacttctcaagtaatatctgtgatgaattttccatgactcgatgaatcatctaattctgttggaatattcttgtttagaaatattctatatcctaaattgttgatcatagaattcgtgttagaagcatctcgaagcgttttcctttctatatatgcaaagtccttctcacagttaatatttagatcgctattttctttaaaatatttattcttgacaaaattcaatacatcattccatgtatatgcctttattctatcgattggttccctagactcaggaactgttgtctcgtcgttgtattcaaaaacttcaaagtagtcaatcgacttgttacactctccacagtaagtcttcttactaatttgtctacatttttcacattgtaatattatggccatattagaatattatcagatcttgagcatatttattaaatacttacaaaagtgccttcagcagccacaatataagacaagtattattctacattacaaactataatttctcatcactattatccgtatttctaattgtaaatcaaagccgaaagggctggcaataccatctaacataaagccgcgctcaaactcggggaatgccaaggcagtaaagcatgaccatggatatcccttgatgattctttttgatccaataaataatattaatttcgatggacctggatctcccaaaattttactcctcttgctctgttgggatttcccaatattcttgatttgtaggcaaccagattcaaaaattatttgtcttctatttctaataatgttatattcctgttaggatgtaccgaaataatcggatattctgctatgactctttcttgttttaattatactgctatttccaatccattcattttttgatatggttaagttattacacgcgaaggatagtgccatgtccagtgtttcaaatttgttgcatctcattctcaaagcctctcttattccctctcttatttgccagactccgacagggagaatgtattctggatgtatttctctaaggactattactgatgcatttcttttttggtaatgtaggaattctatggcagctaacctagcagcaaaataagatcccccaatttttggatagttcttcagaccaattgaatcctctgtatctgtatctatctttgcatctcctttattatctatccatgcttcatgcatctcaaaactccataactcatctgggattaagacaatggaataataattccccaggtgaacgtatttgtagatcctaatctgatcgagtggcggaaaggtattagttttttttatcaagtcagatgaaatcgtttgatcaattgcagagatgctccatttggttggtacgagttttctattttttttaatcccaatcattcctaaacttaggattttactaattttacttatctcaattccttcttcatataaatagttgattgcttctatggctctaaaatcaagatcataaaatgctttttcaattttcttgttactagaaatatttgaaggcactttcaaactctctaattctgatgccatcccgaattggaccgtgtcagaatccgatgtcgtccttgatgaaatttcttctaaattcaatatgggttttctctcaaatgtaacttctatttcagtagatctagttgccatagttaattcctgtagggattggatatagcgatcagcattcaaatttgtttttacatgagttgaatatgtgcctctgataagagatagtttgtatcttattatatcttcaatggactttcctgcccatttttcggggtgatccagtattgtcgaatcggtttgcaatggtgaaaataagggtccaacttttacttttggatatgtgtaactgctaacgaatacagagggaggagatccacctgatattttttctgaaagattattgaagttcgatcttaagatttgttcccaactttctgttatgtgttttcttatcccctcggtgttcttgccatgcattgcaaattgaatctgtttgttaatgatcttatttgaatttacatcctacaatgatgggacctgagattgacagatcaggaaatttggttagaattgcgaagagacctttttgatgtaattagagtaatttattatttcaattttttgagtagttctcgtacggataacgtatttagtatatcatttcgtcctgcccatcctcttcttgcttgtcctataccaatttccaaaaatgcataatgcaggggatgatgagcatctgaatcaacaaccaacttaacttcattctgtatagctgttcttatgtattcatcacgtaaatctaacctgttatagtgagaatcaatttccagaattgtgttagtttcgtttgcaattgtcattaatttcggaatatccacaggatagccatctcttttattaatgattctgccagttgggtgaaagataatatctacgctcggattttgggctgctttaattaacctattagtttgtacctctattggttgagaaaaattagaatgaattgcagcacctactatgtctaatttatccaaaatgttgtttggaatgtctaatgaaccgttgctaaggatgtttacttctgctgaagaaagtattctaaagtcactcaaattcctttcgcttttttttctcttcttttcgtagttgcttgttttcctctctaactgtttttcttcattatgtttatttagatccacaaagaaagtaccgctttttattgaatcattaaattcttgaatcttgtgtgcttggtctagtagctgttgttcatctaatcccctagcgattcttaggctttttgtgtgatctgtgatggcgatataatcaagattaaaattcgtcattgcaaaatatgccatctcttttattgacattttcccgtctgtattgtttgaatgtacttgtagatctccttttatatcgccgtattttatcaatcctttcattttttcctgccactcctttgaccctttctttgctatctcaatttctccactgttttctctcaactctggagggatccattccaaccctaattcattgtacaactgttcttctgattcgcctgatattttttgatcggatttaatatcaaataatccccattcatttaagcgaagtgccttggattgtgctaatcttcgcaatgctattccgtgttccttactcccggtaaaatattgtaatgctgctccataactttctttaggaacgaccaataaatcggaatctaatccattattaaatttaataaatgctttagtactacctttgcttagaatttctttaacttcgggcatatttacgaatgaattaattactttatctggattgtctgaaactactagaaaatctatatcacctatggtttccctcattcttctaaaggatcctactgctgttacagtagaaacgttttccaaatttgttaaatatttttccatttgctttaccaatggataaatatctccaagtaaacgcctttttttgcctatgttgtgtaattcaattctccttagtattttttcttctttttttttagaaattcctgaaatcccgtttaacttcccttctctagcagccctttctaaatcactgagatttcttataggtaacttgtcaattattactctcaaagttttcggacctattccttctaagcctacgaaatcatctatctttattgggtattttgattttagtgtttcataatattcaatcttgcctgtttcaatatattcttctatttttgaggagattgctttaccaatagaaggaatttgtattaatccattaatccctctttcctcataaagagatgtaatacttagcggaaggttatcaatttgatcagctgctctaatatatgctctatttttgaaatttaaattagtcttgttatcatcgttatcattatccaactccaggagaaatgaaatcttacgaaggatatcagaaatctctacgtttgtaagtttcacactataactcattctcgggtattcattaattttcttattgatttgttttggtgattgctttgatgtttgaaagggggtgaaacagcggacaccaggaatccatgtttttcatttgtttatatggccatcttaaatttttacatcatataatttgatcaaaaaatcatattattaaacgataatatttataatatttatagatgatactaaaagatatgtagatcatgtaccaataagataataaatattgaaagtttattacaaaatatatatatttagctagacttaatacaaaagaattagcgattttagtcgaatccttgaccattgggataattataggggtatgtggacttgtgacttggttagtaaaaaacaagtttcaaccagaaattgaacgtgatatacaataacgggagcaaaagactttaaaatatgctcgagaaatacgaaaaaaccaatagagattatactttattacaatagtacattctgggattattgaatatcaatccatggtcaaaatttttttggcctgatttagtttctcaaataattctttaatgaacaaatcggcaaacttgtcaaaatcaattgttctaaattgcttctgatattcttctttgcgtttattgtattcttcttgaagccatagaaaatctacttctttcaatcttatactgaatctattagttttagcttggattcaaatacatttatcataaaaattcctgcaatttgtgtaaaattttttaatttatattttctcattgttcttattcgaaataacgatcttttaaaagtgactaatatattacaaaaacataagttgggtattaccttttttgatatccagggaactagtagaactccacgatttacctctgaaattattcattcttaccacaccggtagaactacaatacctaaatttataggccgtgtccttgttatttcaatagtttcggattcgattgttaaccaaattattgaggagatgatgcatagttttgatatgcaagacgaaccatacagcgttctctctgtaaaggatgtggctaatgcctatgaattaggtactgagttggaaggggatgaagttcttgtttcaaaataatctaattccataaatgaataatctcttggaaatggccttaggactttagtattatcttgacgcctttgttcggtgtcttcatatctaccgacggttttctctcttatcttggttactctaagatcttaagtcctgtataatcaaattactattaacggtattagtttaagataagtaaattaggatcaggatcaggattacagtaggggtcctttaatctgtcatgatctagttcaacacgatcttaaccaataatagtctgtccagattattgacaagaattgaccaaagatctaacagaagctgaagcttggaatattatcaaacctatctgtagggaacttgatgaattgagaaatgaaggccacttgatatttttgtctggacttcaaaatgaaaatgatggaacctataaaataaacctgcggagtaatcatttgcattttgcgtcgcgaggattaaaggatagcataggtgatatatcatatgagactggtaggatcagaattggtatgcgagctaatgggattccgataaacatattcgttgaactattttgatatgaaaattttgtattagggaaaatgctcggaataatgaacctagtcattaattcttgatttatgtaaaacatgcattacaggatttcttttactaaaaatggggaatattgccatcaattacgatttttcttgctaaatagccagctgtactatgtgagagtatgacaattggagaatttatagttcatgctcttttagagtaatttgattcgttcttcttttcaatagtatcatacaggggaaggatatcaaagaaattattgttgcggtgataaagatgagatcatatgataactgagaaggaaatgattgtccccccatactgaatactgactcttgaaaagcttgcatataagttgaggcaattactggacctatggaactgcccattaatactaatactactgatatccctatcgagactccgctatactgatggggtgtatgttgcaatgtgatattgaaagctcctacttgtgtcaatgacaatcctgcggagattattatcaaatttagtgaaattaaagattcacttccatgaaatgcgaataaactagcaaaaccaattgtagtcaaaacacttcctacaacaattggcttgaaattgcctatttttgatactataaatcctgaggatggagcaaatattaaaaaaattatcatgaacggcaattgaaccattgcactatccattgcttccccaccaaatccaaacggtattggactagttaccaaaattggtatagtttgataaatcataaacattgttattccaaaaactaagaggataatatttgatggaagcaaaatcctgtctgatattaatctgagtggtattaacggatcctttgcctttctttcaatgagtacaaatgctgtcattgagcaaattgtcagtgtaacaagtgaacctaggacaatgccatcaaacgacgtaaaattattggattcactatttgtgttagcaaaatatgtcaaagttaataggaaagatgaaattgataaagctaacgatattgctcctttaatatctatatgatgtctggtttttttatcactaaggttactttgatctaatcgtctattttcctttttgggttggatgaaatttgaatcttgttcaccctcgttgttgatatttgaagtgtcatcatcctttatccgcttctttattatgatccaaagtatgattgccactggtattatggtgaaaaaggtagcttgccatccaaaattttggactattgtcccacctatagccattccaactactgatcctgcagcaaacatcgaactgaaaactcctataccaattgcaatcttagacataggaaattggtctcttatgattccaaatgcgatggggaacattgaaatacctataccttgaatgattcttgccaaaactaaagtgtaaatattagttgacaatcctcctatggcgatccctataatataaataataaaaatcacaagcaccattttctttctaccatatatgtctgataattttcctgctataggcgtcatgactgctcctgaaattaagtaggccgtcagaatccatgacgaggtactatatgaaatatcaaagtctctaattatatcactaatagctggtaaaagcatggtttctccgtacatcgttatcaaaattgtcgatcccaatattgccagtgttatccacgtggattcgtgaatcttttcgctggcatttggttttatgtttttcatgaatgaatacctagtttagcaaaaaatggtagtaatgttatcagatcatacggctggaattttaacttccttctttaatttacttctatattctctatagtcctcatcaatctccatggctgcttgaagtattttgcttcttattgtgttagatgaattgataaacattcttgtatctttgggaagacaatgacctcctattccatccctaggttctagaacttctacattccattttgtattgagtgattcacgtaattcagaaaaactgatactgttagacttgcaatagagataaagctcttctgcaaatgctatttgaagatatctatgagcattttctactatttttgttagttctgctacttcaactgacgatactggatgcattggaattgatagagtttttatcccagctgttaattcagcctttgttgtttctgttgtctgggataccacttcccgtccatcataaaagttaagaccgtgttgcaagcagcagttgcttacacctcctacaatacgtaattgattaacaccgtgaacctcttcttctaatgcataccatctatgtggtgcatgtacaacgtgtagtctgtggtctactttttcaaatacttttttagatgtaccttttggtattgtgctttcaattgatattagtgcgcctgttttagcttctctagataacttttcaactacagacatcaaaccatctacttgtggtgtaaacatatcatctggtctatgtgtagatacacagataattagtacgtcaaaatcaccaaagttggatgcttgctttattccatagttggcttcagctgattgcatggttttttgatttatatcatatccataagtatcaaaaccatgttctttaacatattttgcaactggaagaccaagttggccaagtcctatgataactactttatcatttttaaggatgttgggcctttgggcatttaacttgttagatgtaattgaattagtagtgctaaggacactatctgaataactaaactgttcctgtgtcttcaaacgcatgccgtctaaagactggtcattttccttccttaatggaatcatgatttatcttactaatactccttaataaattaaactgactggtcagacatgtttattagcatccagacctaaattaacttgttcgtgtctagacttgattttaattcccaagaccttgcttcaaagtattttttacgatttagaatgagaattgcctcattacctaacgatataaaaaatgatactagaaaatttcaaattatttgtagttacattaaacctataatatcgtgtgccataaattttttattaaaaaaaagtggaaaatcagatgtgcctcgtattggagtagtaaacctcagaggatacaagtattattacacacatcttgaaatgggtgatcattaatgtgtccaaaggtaacatctcaacataagcaagaagtacgaggtaggattatccaatcagcaattgaatgcttttctaaaaatggattcgatcgaactcgaatggatgaaatatctcttttggccgatttaagtaaaggaacattatataattattttgataataaagaagatttatttcatgcaatttgtgaggacagtctcgacctactaaaaattcaacttgatcacttatttactaaaagtagggatgacctaatatccaatgcagaattattttacgaaaactttcaaaaaatacaaaaggaaggaagtgcaaaggtcttttttgaggccttatcagaatcaacacgcaatccaaaattaaaaataatcttgttcaagcatagactcaaaatctataaagttgttgaaaactatttgcagatccaaagtgacaaggggtttattaaaggtgatattaacttaacctatgttgcctcaggaatggtgtctttgtttgacggtattaccgcaggaagtctccttgggatccctgaagattataataagaatatttgggctgtaacgataaaggcgatattgtcaaatttaaactagaaccaaaccaaagctaaaaagttggcacatcaatttcaagtggagtgatcccaattcatatcgactaatctgtaataatttataactcattacatcattaagacgagtgtgtcattattgccttttaaaaataaagttccaaaaataaattccgattgttttattgcaccgaattctgtgattatcggtgacgtagaaataggctctcgtacatcgatttggtttggtactgttcttagaggtgatgtctttcacatcaaggttggatataataccaatatacaagataatagtgttgtacatgttaccgctaataaatatccaaccataattggtaacaatgttaccattggtcattcggtgacacttcatggttgttcaataaaagataactcgctggttgggattggatctgttgtcatggatgagtgcgagcttggagaatggtctataattgctgcaggatccgtggttaagccaaacactaagattccctcaggtaaactttgggggggattgcccgcaaaggaaatccgtgacataaatgacaaggaacgagaatggataaaagagttatcaaataattacttagaattatcaaaacaatatttgagcatatgaggggaattagaaatatgtttttcaaatctgtaatcggtgaatcaaacttgcccctacatgtgaatattcaaatctaatatctaaaaccagcctgcatatgttggaatactagcaatgtgttttagtagagttctattatataactaactaggttaattttgtttcttttatttttattgaacatgatgttgtactattaatgaagtaatcagttatcaaactgctttatgggattagctgggatcttcaataatgctaaagattataccatttaatctactattaatattcttagtagtggtagtaacaggttcaagcacacacgcaatctttaatcaaaacgtattagcacaaaactctggtgaagacagttcccgtggattaaattttgatagtctattcggaagtagcaaagaaggtttcagcttcgatgaaatgttcccatttggtgattctagcaccactggttctcaggatgaatcatcatctagcgatgatgactccgccactggttctcaggatgaatccgcagctactgacccaatgggtgggatcgatcttgtatttccattcaatgatattcaatctccaaaagcacaatctgatacacaatctgaagatgcaagctccacaagtccagacgccagtagtaaatccgtagatccacagactgacgcagcctcttctaaagacgaaagcgacgcagcctcttctaaagacgaaagcgacgcagcctcttctaaagacgaaagcgacgcagcctcttctaaagacgaaagcgacgcagcctcttctaaagacgaaagcgacgcagcctcttctaaagacgaaagcgacgcagcctcttctaaagacgaaagcgacgcagcctcttctaaagacgaaagcgacgcagcctcttctaaagacgaaagcgacgcagcctcttctaaagacgaaagcgacgcagcctcttctaaagacgaaagcgacgcagcctcttctaaagacgaaagcgacgcagcctcttctaaagacgaaagcgacgcagcctcttctaaagacgaaagcgacgcagcctcttctaaagacgaaagcgacgcagcctcttctaaagacgaaagcgacgcagcctcttctaaagacgaaagcgacgcagcctcttctaaagacgaaagcgacgcagcctcttctaaagacgaaagcgacgcagcctcttctaaagacgaaagcgacgcagcctcttctaaagacgaaagcgacgcagcctcttctaaagacgaaagcgacgcagcctcttctaaagacgaaagcgacgcagcctcttctaaagacgaaagcgacgcagcctcttctaaagacgaaagcgacgcaacctcttctaaagacgaaagcgacgcagcctcttctaaagacgaaagcgacgcagcctcttctaaagacgaaagcgacgcagcctcttctaaagacgaaagcgacgcagcctcttctaaagacgaaagcgacgcagcctcttctaaagacgaaagcgacgcagcctcttctaaagacgaaagcgacgcagcctcttctaaagacgaaagcgacaaatcaagctctgacaactctcgtatgattgctcctcaaagtgaaaccaccgcaacagaaacaggaaaaccagtagctcctcaaagtgaaacaacaacaacagaaacaggtaaaccactagctccaatagcataataggattgacaatgattaggtgatgcaggtgcgaatggaaaaatttcatacctgcaagcctaaaacaaaatttttatatttttgatttattcagattattagtatttttttgacgtattatttcgggccattcgacataaagaataattaattttacaagagaaaattccaaagtgcaagttgttagtctagaaaaactcattatttacagctattcttaatattattatgaatttatggatcttaattttacaattctttcatttggcagtacaacatgtagttttttcaatagtaattagtttcatgaaacggattcaaatattttcttgagatcttccttaagggctttgtatttgtccaatcttgttcgtccttcctccgtggatggtatattctctaataattttctttgttctttttctgtcatacagtcaaccgagttcaggatgtcttctagttcagactttgataattcaagtgtgattatttcattgggatgattcgttttaacaatttttgtcatgttcatattgctataatcaaattaatatctttgttcataaccaaacacagactagcccggttgcaacgattttcgacattaaaattaatcgaaatggttaaggttaaacattgattggtccaaataagttcatatcttaaatagtctcaatttacgccttcataatgcaattatttaattctctcttaaatattcaaatgttactgctgttgtaatatgtttcacaaattcatttgtgttctaatttcaaataggatggagtacattatatgtcgttagtctcagaaattattttatttttagactaacttcttccccatgtccgatcgggactgttactgattttatagaatcttttttccttatatgttctatatatttggacatacttggtctatattcctcaggatacaatacattatccgtaacgatcactccacccttctttactattgagacagctaaatcaaaatattctggtaaattttctttgtcagcatccaaaaaaatgaagtcaaaatatttggattgatcgcctgaattatccttaacataatttgacaattgccttaggacttctatggcgtttcctttaattatttctattatgtcactgactccagcattcctaaaatttgttgctgctttcttagcctttagtggattattgtctatggtagttatatttccttttggcgggtgagagttttcttcattctgataaaacgaatatgctaaccacagtgtcgagtatccaacagaagtacctacctctaatatctttttggcattcattgatgatagtaagatactaaaaaattttccagtgtccccggtaatcgcaagcatcgaatcctcatgggatacctctgctaagcctgatctttctaatgttgattgtttttccagctcagttaagactttcatgattctcgaacaagtattacgatccaagtctgacattttctagtaccgtgattatttggttatcctaatattaaaaagatatttctcgcattctaaattgatagaattaaagatcatagttaatttttgccttttccccggtacttaaatagaaaagacaaaaatcatgaatttggagtctgatcttgatattttgacctaatacatgaatgatactaaaaccccgataaatgcccggaataaacttcaacacgcagtcaatatgttaaccgtcaaccgaggtgacctgttataatttagctgatcagaatgatttactttatgataacaggagaatagcaatctaatgctatcaaagatagggtacagaatctaggatttaaagaaaaaactgaagataaaccttcagaaaatataccagtgttctagtgagagagattgtaaaagtaccgtctatttcgagaaatagaaatttcaggtttgattactagtttttactcaatttagggactgaaaatatcttgcatttagtaaaatttgattagtatcattctaaaaaaatattttttctagctctgatcaaaaaattgataatatttctgcttttggcattttgtttctaatgttatcataattttccagtattcaattattattaattgctaaatccaaaaaagataaaaaaattgcaaatatttttaataaagttcatcttacaataagttatagaatgaaaacccttcaaattgctacctttggtgacgatgatcaagatggaattgcactagggatccgaaattttccaattcatcaactcatattgatatgctactcaagtgatgaatccaaagctatcgaatattcaaagaagattgaaacaataatcggtatcggttcagaaataattcttgttgagaaggaaaacgtcgtaaaggatacaattgaaagagttaatgaagtattgttaaagaaaagtatggaatatcatcagatacttatgaatgtaagttccggggataaattaatcagttgtgctgcactctcatcagcattcattaatggaataaaggcttttgcaatggaccatgctcacactgtacctctgttattaccagtactaaagttcagttacagcgaaatcatatcagataccaaaataaaaatactgcaaagtattgatagcataggcggcatggtaagcagcttggaagaactagaacaaatttcgggttacggaaaacctcttttgagctatcatgttcaaggcggtaaggaaaataaaggattggcagatttggggttggtagaagtagacaaaggtgacagaggtaaaacagtaattaacattactactttgggcaaactaatggttacatccaacctcgtaaattcttctcagcattaatattatgttaatcttaaaaaatataataatctaagtgtcagatgggctcgtagcgcagactttggataatcaaaggtgcataatggatagcgcggacgcctcctaagcgtcaggccgagggttcaaatccctccgggcccgttacgataaagattgttttaatttacatgtcctgtccaaatcatttgaacgaaatggtctctaatctcagtaatattgggattagtaatctttaaagcttgatatgtttattgaaatagaaatccaatcataaagtgctagtaaaacgaatccacgttgaatatcggatttatcgattattttttttaagaaaaaccataacatccaagacactaacaaaggaggtttcttaattggtccatcatagcaaaattaattattctaaaattgtccagcatatgaaggtctatgtaaatgctcttgacaataataggccgaacacggaacacacctggatatcggcttaccagaacaatgatgtacaggacaaaaaattgtattttcatgggttgtggatgattctatatttaaatgctcaaatgaaatattgtttaatgaatcaaaataatctgtggacatttcaaacaatactatggggaaaagaatctagataagcattcgaggcgatataatctatttactcttatatcatgacagatggatttacttatttctgcggctaaattacctattattatttgatatgtagtaatctactagaatctatttaaagaactgatatcagtcgtaagcccttcaggtcctttttatttattctaataatagtatttataaaaaaataaaatgtagttccaaatttggtagaacgagaattagagatccaactgccaacacttagtattctagataacttgaccgtctcacttctcaaattagtttaaataaataattgaaactttggttgatttggcctcaaaggaagaaatcgcttattgccacttgctataaatatgataaatatttgtttttcagatttatgctggatacgaactttcgcttttcccattcttattgatgatcaaaatatctataccatcaccacttgcagaatccctttgaatggatgatcgaatggatcttaatgctagatttgttgccttctcctcatctaggttttcattgaactctgcatccattactcccaatgccatttcagctccagttcctactgcagcatatctatctggtaaaaccgaacctagtggatcgagagtataaatttctggttttccagttgtaacacctcccaccacaacctgagtcaataagggaaagtatctcctttcaaacattatgacggacatcagttttgcaaccgaatttggttcgacgttacgtcgggtttccaatttcctgatttttgatagagcgcttacctggcgtacaagaacctgcatgtcagcaaccatacctgcacaggcggcacccacatgatcagtaacattaaatgtttttttagtatttttattaactacgaaattgccatatgaaactctcttttcagcagccaaaagtactccatcattgtaagtaatcccaactgctgttgctccgggcataaattgaaaagccatttaataattaaaaaaaaagagttagatttagtcgtttctatattgatgcctactttttcaacattgagtagtcatgaatcttgattgcttcggatattagcttattttgaatttctagaatgtcctttgcctctggatactttgatccaaccaccacctctgcaacaatatttgttatgtgtctgaataggaattcatctcctctttgagcctctaccttataggtggaatgagccttatttacaaagacgatattttcatttgtaaaactgtatctcggatcagtttcatcctcgtaggggatcaccttgtatcctattttttttagcgtgaaagtttttttgagaataggctttctaaccgtttttctaatcatcccgttgttgccagtagcgaggttgtcttggtaattattatttgaaatctgtgttaaagaagcactctctctgttggtagaatcgttaagagcaaattcatttgctgaatttgagatttcagaattgtttaaaattttgtctctattgtctgtataattgtctgataaagaggtttttgtagatttctttgcattcaaatcatcaaaatttgaatcagaatttcgtttgctgttttcatcaccgatatctaaatcattgttcccatcttcctgtgttaaggtaaaagatacattatcggttttattattttcataaccttgaattgaatttgaatcgcctgtcagactatcttttatgtgacttgagccatctgttccgttctcgccagctggggatgaaacctcgaccgattcgaatccttgaatttcttctactggttcaagggtttccaaaacagcttgacccatgactttatctatttccttataaatttttgattcttcccttgtaatgagaacgtcttcatattctgttaggctcggaagcacttgatcaattatgaatgtttttacattttgattgaaagcgttataggtatcattctcaatcaacgccgatttatctgcaaacctggatgtaagttcgtcgcattttacatatcctgtaactcggctcagcttgttgtcaaatccaaatgtgctcctcaaaaccacgtgattacctaccattattgctattcctttctcatcttgccccaaaggccttctcgcaatggttatttcaccggtggttcttggattatctaaatttacttctaacttgtaaccttgaatatctggcgagtgtattacttgggaattagacatatcccattctttaatattgttagcagatttgatatacacctcaaatagtggatattttagaatagagagtttcttaatctctttggaaagtttgtttatgtcgatgctaattttagatcctatcaaaaatatttcagtaccatttctgctgagttttggttcttttatctcacgtaattttgctcttccagtaataagctcctctaatgtattcccatcaatagctatggttttgctaaaatcatccagccgagttttgattttcatttgattaaacgaagtcaaaaaggataaccgtccagtaccatatcttcccgttcttaaccttttcaattttggtgaaagagtttcttcagctttatggggtgagcctaatatcaaaaacttgtccattgaattggagttcatccctgcgttatcttcaattaccacgttgccgttttctaatactgttacgagaacattcgttgcatcctcgtcaaaggcgttttcaatcagttctctcactatttcgtagggagatatccacgttttcgtggcaaactctctaaaaaatgatggatgaacctttaattccatagtcaatatattttagtttttaggagaagattatttaaataaatattaaaaattagttgactaaattcctaattttttttcacaatctcagggctgtgtttctatgttgatacagtgggggtaaagccaagtattatgaccttcggaattaaatctactaaacctaacgttattttaggcggatgagtttcgatgaatggatgtaccgtcgtataataaattaacaaaactggaactgcagcgcatcctgctatagttaaaaggattagccaagtagctgtcatctttcccgtaagcatgtaattttaaaaatggttgagatatataaagataaagctctcatacgtatattatttaatctcataatcgaaaggaaatttccttaaaagcattccagaatttatcaccgacatagtgcagattatttatgatctgtcccttttgtaattctttggcgttaatgctgtcctcaagtgctataccgacagataaatattttccatatttttcctcctttgctacaactatgtcatttttcttgaattgactaaactctacaatacctggacgcaatatctttgctccattacatatgaactttatagaacccgagtccacaattatcgaagggaatttttccaggacttcggttctgcccaaaaaaggcagtatagtctcctcagaaatgaaaactgcaacaagggaatcgataaccaagatactcttattctcttcaatttcaaaaactttaatattcttagttttgggaatcgatatcttctcctcccagccattgactattgttttgagtattttctccgtatctttcttggagatcacatacgtcttcaaacagcttattcaattcgtcatagataataaagatgtataattattgatcatataatagtgattattggttattgcttattatatctcatgcagatatccacaaatttagcgaatctaaaatcaaaaatcttgtagtctatatgtctcttttttttacactttatcttaatcctcaaattggaaaaaaaatttttataaataattagaccatacattaaatctaattgagatgagtgaatcgcccgatacgaaatatgaggttccaataaagcaagtggaaaaaacattgaaaataagtgatagagccaaagctgagttaaaaagctcagggatgatggatgataaaggtaaactaaaactaaagggcgtcagtccaaaaatgttaaagagaatgaagttagaatctatagattgtcctgtgttcaaacaggaacttggctttgtagaatgctacgtttgtagcaattttcatagtagaattagtggtgtggtttattgcaagggtgaccctttagagtagtctagttatttctttttgttgcgccattaataacagcataagcttcataaatagaaatccatagctatcttttgattaattggaccagaaaatcagtaaagaattcggtattagtgtgaaaaaagatgaaaactttagcgagtggtattctcaaataattgaaaaaacagggttggcggattatatatctgcaaaaggtttcattgtcctgcggccatacggttttgctatctgggacctcatcaagacttatttagatcagaaattcaaagagacaggacacctaaacggattcttaccttgcttgatacctgaaagtctgttgaacaaagaggaaaaacatttcaagggatttaatccagaggtcttttgggtaacgtcgtctggtgattctttgttgaatgaaaaattagcgttgagacccacctctgaggctctactttattcaatatttccgaaatggatatccagttatcgagatcttccacttaaaatgaatttttggaacaccgctttgagggctgagataaagtcaacaaaacccttcatacgaaattcggaattcttatggcaagagggtcatacagctcacgccaacaaaaaagaggcagaggacgaagtaatgacaattttgcatctctacaaatactttattgaaaaagtccttttaattcctacgatatctggctacaaaagcaacaaagagaaatttgttggcgcagattatactacttcattggaggggttgatgcctgatggaaaagcactacaacttggtacttcccataacttgggtcttaatttttcacaaccatttgaaattaaatttttgaacaaaaacaataatgaagattttgtttgccaaacttcttgggggatatcttggagattgattggagcgttagtaatggttcatggagatgacaaaggtttgatattacctccaatcgtagccccaatccaaattattattgttccaatttacaaaaatgtaaatgcacatttagttaaagaccatgctaataggctaaaagatagtttggtatctttaggctatagggtttttgtagatgaaagagatgagtttaccgctggatggaaatataatgaatgggaaatgaaaggggtccctgtccgaataaatattggacagagagatattgaaagaaataatgtagaagtagtgagaagagataatagacaaaaaagtattgtccctatggaggatttgagtaaagaaatcgagaaaatttttcaaggtttgcaatctaatttgtactgcaaagccgaaacatttcttaaagagaaaacaaaaatcataacaaattatgacgatttcaagaggaatttggattattattcaggctttatggtgacaggttggtgtggtaatgaagactgtgaagtcagagtaaaggaggatactggagcagacattagggtaatcccgtttgattcaaaagacctcccaacagaactcaatacgacatatgacctaattaaggattgtatatattgcggaaaaaaggcaaataagacagttatctttgcaaaagcatattgataaaatacttttattttgaattactcaacggggatgaaataagagagaattaaaatttaaacagaatgtttatgtaaggtttaaaatccaaattatttattacaagttgtcaaaaaagaacaaggataacaagaggaaagatataaagataatcataatcattgttgtagtctttgctatagcatttatttctattaggactctattggccgactctaatccgttttatgtagtggcaagtggtagcatgatccctgtactcaacataaatgatttgataatagtttgggaaaaggacaatagcacttttgctaatgcgaatataggtgatatcatcgtttttaaagccccggatccagcggaagaaaataagaccattgtgcaccgggtatcagccatcattgagaaagggaataatttgacaggaaacgtgatcctttgtgctcctattgccataaatgaagtcatacaggaaaaaacaattttgacaaaaggagatgcaaacgaatgttccattcctggaatagattttccgataacaaaggagaactatgtagggaaagttatctatacaatcccacaggtgggtatcattcctcaggttttgaaaccccctgtaaactatatcataatggctataattgctggattattgatatattcattcattcgtggaggtaaaaaggataaacaggaagaggagaaagaaaaattaaaagatgagtgaatcccgtgcgatacctttagaattagctgtactaatgtataggcaggatgatccaaacaagtgtacagcatcacgacttgttaaatttaagatggttaaggaagtaagaagggttcctaccacatttttggtactcaaccctttcgctgaaaaaatggttatccctaatgatatgaaaaaatttagaggcatttgcgctattgattgctcttggaaattagcacctcaggtaattaatacgtccaaaaaattctttaataataggaagcttcctgctttattggccggaaatcctaccaattatgccaaattaggaatgctttcaactgttgaagccatatccgcagcattgtatattttgaattacaaagaaatgtctagagaaattttaaataaatttaagtggggacatacatttctggatttaaactccgaaatcttggaggattattctcatgcactaggagaagatgagatcataacgatagaaaaggattactttccacacatattcaactcctaacaacaaattctacgaaaagtactgcattaaaatcaaattacactggaaggataatttcgttaatacaaattagttcatatattcaaaaatatttcaatatcaatctttttggacttggaaaagagtattaattatatcttcaactagaaagaatattctaaaaacaactagtaaatgagaaagttaataactttagagtttcatttttacttgtgagctagcgagcaagttacttctagcaatatataacgaagaggaaactcctccctcactacgggcacctgaattagcgataattagaaggagacttctggcaacgaaatagaaaaggatccagttgagatcaaaggcaatgatgattaataatctgagtgatttcaaccttggagtgaaactgtcgacctaggtggagaaaggccaaacagagttaggaacccgtacatacactcaggtaggctgcttagctaaatcttgcttaaaacaaaaggagggttactactaggacacacgatgtgggattcataagggaaacttttccattttgaatcccatactatttatcttcgaataaacttcgaaaatctattaattctaattgtcactaccgataaattgtagtatagaatggatgataatttagactgtccagcgctcttaacgggtaacgatcattcgaggttcctatcaaaaagatatggatataaagagtggatgatatctagatttctaaattttattccttatcctgaaaagatgctagattatatccataatagtaaaaacttgcattattatataagagtaaatacgctaagaactaacccacaagaactaaaaaggcgactcaatgagaagggctatcacttaagcgaaacaattctaaaagaagtatttgagataaagaaccctgggttcgggagtattcgaattaaggacgctgggattacaattgataataaaaatagtgatgataaccatgacaataaggacgttgttatcatgcaaaaagattacgatttgcagtctagcaaagatagtgaccttaggtccaaacagcctagtataggttcaacgattgaatatttgaaaggatactattacattcaggatttgagctcgtgcattgcagtagaggaattagaaattcatgctggatccgatttggttgtattagatatggctgcggcacctgggggcaagacaactcatatcgctcaaaaattaaataataagggagcaattttcgcatgcgaattaaactctaacagacttgcacctctactttttaacttgtcacgttgttttgtgcaaaatacaatagtgcttaatattaatgcagaagagataaacgaacttgaattacattttgatagggtactgcttgatgctccttgtacctgtgaaggggttattatgaaagacaattctagaaagaaaagtcgtaatttagtagatttggaaacctgcagtaacaggcaaaaaaaaatgatagtatctggttttaatgttttgaaaccagacggacttttgatatattgcacttgttcctttgccccagaagaaaatgagatgataatacaacatctcctaaacaatcacaaaaatgcaatactcgagccattaaattatggaatgaatggtttgaccaacttttcaaagtaccaattcgacgagaaaatgatatttaccaaaaggttctatcctcatatccattcaaccaacggattttttatagcaaaaataaggaagaaaccgaactaaaatgacttttagaaatttgactaatgttgaagaaacgattttaaaaagatcctttaataattggggaatttttgaaatttttggaacactaagaatattaatccgaaccttacctttagataccgctattagtgatcaaaagacaaacatttcaaaacatgatgccatcccaaacaaaattctacgtaaccattcaagtggtaatagtagtaatgcagacggaaaatataacgacaataatcagggacgaattcatgccttagaattagagtacccacatggtattgaattcgctgagtcggaaataaaaataaagagaactgaagaagttttcgttcattccaacgttaaatataacgatatgctgtttaaaaaattaattcctattagtatcggtatgaaaatcggtactattaagaacaagaaattttctccaggtttaaattttgccgaattcgtagtcaaacacaacaaaaatatggattatcctcatgttatcatcaatactaaggctgaaaatctaatagtttttggtagggacacaatgggaagttcaattctttcgtttttcaaagatataaaagaaaatcagcaagttataatattaaaccataataaggaggttattggattcggtaaatctagatattcggggagcttgattattcaacctaatattataacgatagatactactcaggatattggtacttactatctaaaaagtgaaaatagactatctaaatctgttgacaaaaatatagaccattttctataaatacaaacaacaaaaaaattattaaattctattgattatttccttgcttttactagtactaggattgccactcctgccatcatcgctccaaatatcaatatgacttgtatgggaaagctacccgaagatgtagccacaccttggggtgctacggatgatacaaggagatattctttatctcctgattgttgaacttgagagaatccccctatctgcatctgtccacttggaggagctgttaaaccatcaacttcaacatttactccatcaatatcggctgaatcagaagtttgttttactgtgtgtgttccttccctgaaactactctcccctaaagaatatatcgaaactatctttgatcctccctcagtgacagaaaacccaaaacctgctgcacctgcttgagcaccagttgcgtcaaacaaaaagtgccagttattcattgacgatccaaaatctgcaaaatccataattggggtttcaaatgcaggagctaaagttgtattttgaattttagtagctacctctggagctagtttttccaaacctcctataggatgattaatgtcaatctgaccatattcttcagtatttactatcaatggttcttccaatgcaatacttctccaatctacatccaaaatagatgaagtagatccgtttgatccagttacaaggttagtaataagtggatgcaattccacctggtatgaaacagttgaagttgtgggtcctccattaagggttgctttataatctagtgtgccgttttcaaattttactaaactttgtttttgagaaagtaattcattgtttattttatccaaaatctcagatacgccattactgctatctgaagaattcaatgaaaatgagattgatgttttatttccatctaagagttgtgacatagtgctattagcgggatactttaaggtaagaattctatcacctgtataggaagcgtccgctgtatttattgcaggtgagactcctgcttccatttgtatagcaaagctttgattaataatcccgctaaaaaaaacaatagccaataatactattacataatttagagaccttaatttcaatatttttgaattccatttagcctgtttataagcttattgaaatatccttacttgaggtgaattcacattgaatactgcatatttagaattaaaaattatattttatctactataaaagtaaaaaaatcataacataacaaacagaaaaaaaacaaagaataaaaaaaagaaaaaaatagaactgtaatattgattaccattttagccgggggaacaggttctgttaaattagttagaggaatgtataaggaatcagaaaatatttcaattatttcaaatgtcgcagataacttttggcattatggactctatatttgtccagatatcgatacgataatctatggactcagtaataatttggacaaaaagaagggctgggggataaaaagagattcttttaatttcttaaaatatatgaatgctcttgggactgaaacatggtttaatctcggggataaagatttgacaacccatgttttgagaacacagctattacaagaggggcggagtttaactgaaatcaccaatttctttacagacaaatatggtctatcactactcgtagctcctgcctctgatactcattatgaatcaaacatggtggttgaaggcaacaaacgaattcatttacaagaatactggataaaatacaaaggttcggtgccggtgcatgacattatttacaataacattgaaaaagccagggttactttacaagctcaaaaaacacttgaagaatcaagattgatcttatttgctcccggaaatccgatcaccagcattgggccaataataagcatacctggtatgaaaaaccttttgaagaagttaaaaaataaaattgttatgatttctccccttatatctaatagagcagtcagtggcccatgtgaaatttatatgaaggcgaagaatatctctcctaatttgagggggttaattgacttttattcagaaattgctaatacaatgatcttcgataaacttgatgaatctgaaattgaaaataaactaaaaaacgattatcctgaaataaacttttgttattctgacatccttatgacgaatttaagaaaagaaacatcactggcgcggtatataatttctaatttttaagaatagactagggttattttttgagcaacacaagaactgcaataattattccgataaaaagatttgaaaagagtaagacacggttgagcggatttcttagccaagaacaaagagcttggctttgtaaccttatggtaaatgatttgattgaaaaaatgtccgagttagaagaatgtaatatgattttggttacaaatgaaattattaagataccggcgaaatcaagagaaaaagcaatagtgttatctgaaggtcggagcaacggagtaaatgatgctgttaaaattgcagattattatataaagaaaaacaaatttgatagctcgattgtgatcccaatagatataccactgctaacgctaaaagaaataagagagatcatttctttcgcacatgactttaaagaaattattagtatggttccttcaaatagattcgatggaaccaacatattgttgagaaaaccgcattcgataatagatacgagctttgataataacagttttttcaaccattttagaaaagctctagataatggagtctcactaaaaatattttaccacgagaatttgaagctggatatagatactatcgatgatgtgatgctggctttgaaaaaatatcatctagctaaatctactctcgaaacgagagcctcagaacaaaaagaagtgcacaaggatgaaaataaatcgatagaatatctattgaaagtatttcagaacagagatgaacttggttattaagtactatgggtttcaatttagcattttgtaatattgtgctttaagaaaaatgtaagtagttagacaggaaaaattctttcattcaagatatttattggtagtatagcaataattaacgtacttgatacataatatcattgctatcatagccatttcattcatagtagttggtggtttatggggcattggtaatttattaaatactcctcaggaaaaaaatattcaaaagtcaaatgattcaattctattaatagctcaaaataatgcctttaaccagaccaatccaactttatatgtgaatgcaagtcaacctactagactaataattcttaataaagactttgtgaaacatgatttcatttctgaggaactaggcatcaataccgcctacttgacaactgagcaagattttataacaggaattgcaagtaataaaacaggcaactacacatattattgctcttttcatcccgaaatgaagggagaaattgttgtaagatgatcaaaaatatgatataacataaaatcacaaatatattcaaagaacgattttcacttaaccctgttttaaactcgataaagtgaattttctgttaaaatattattaaataactgtttatctttttacttgctaagcgattactacatgtacagcccttcagaggatacttattttatggaggatattctctcaaattatagaggtaaaattgcccttgaggtcggtatcggatctggatacttaaccagattattatgtacaaactttgagtttgttgtaggaactgatattgatgttaattctatcttgtatgccaaaaataatactctggcaaatattgggaacaaactgttggtttgctctgatttgagtctaccattaaaatgtaaatttgatttgattattagcaatccaccgtatttaccaacggatttcggtaatcttgatgatactaccgtttatggaggaaaaaaaggtatcgaattgactattcgattattgagatcagttcaattgcaacttagcgaaagggggaaaattgtgataatgagatcaaccttatctgatctcaaaaaaatggatgatttcattaataaattgttttcaaacaccaaaataatcgcaagaaaaacgttcttttttgaatctttagaaatattggaactctctggggtaagatatagttctgtgatttaattatctcaagtaaaaagaaaagatatatgatcaaacctaggacaataaaaggaaaaacgcaaacacaaaagggatcagttgattttagtaatagattttgtgattactttttgattaatgctgctgacctttgagcaattgcctctgccatttttgataatgacgatgatccacccagatcgtatgtcaaaaactttccctcatcaatcgtttgttcagtggctttgaaaattgcttcagaaatatgtttctctcccaagtattcgaccatccaagcacctgacaatatggttgccactggatttaccttgtcttgcctagcatgctttggagcgctcccgtgagcaggttcaaacattgcatatgcatcaccataatttccagaataaacattgccaatggaccctacatgtcctgatgcacattcagagattatatccataaataaatttgtactaagtagtaaactattgttgaatctttctggattcttgactagttgttgagtcatgttatcgatataatattcttcgacttcgatgtctggatatgttttgtttgtttccactactgcattccaaaaaatcccgtcggtttccttcaaaatatttcgtttagttattgcaaatatttttttaaatcctttttctttagctagttcaaaaccctttttgactaccctcctgcaaccctttccagtggtttttctaattgcaatggccgaatcatcacttgtcttaaactcaatacctgcatacagcccttctgttgattctcttacacaaataaaatttagctgtaatttcgaaatcttgtatgttttgatcgggcggatgtttgcgtatagttgaaatttttgtcttatgcttacggcaacacttctaggtgcatcgggatttgggactgtagtggtaggacctttaaaacaagcatcagatgattttagagtgtcccatacctcatttgagatataagaattacccccatttttttcccaccattcagagccagcatcacatggtattaattcaacgtcagtattacatgattttaaaactttaatcatcgcattaactaattcaggaccagtaccgtcaccatttattacagcagcttttttattgctcaaatgaactcaaaaaatgtttgactatattcatatttattttttcagttactttgggataaaatcaatcctcccaaaaaaagcattggaaaatggtggaaactcggtattattttcaattttagtaaactctcctttgtctgaataatacgaatattggacgtcataatcggcaagttctagagtgctatttacatatttgccagttgaattatctaccaaatttacagttttattatcatatgaatagattttcatcaagtcgggtaaggacaaatgaaccggtctgatatattgaacatgaagagtatcacctatcgaatcagtatgaattggttttaaacattccttcccttctacgagttgcctgcctacgttatcaggaaacaaatattgtttattgtctacaaacaattggacccttggataaacattgtaactatccaatgaatgtgctttgaggcagacgctcaatatttcaggagggggaacaatctgtgtaaatacaagtccaaataatacagctacccctatgattatcggaggcaaaagtaaatcctttttacccattttttgaaaaaaattctttcgtggggtcccctcttttaactttctcttgggcacaaattcaatattcttctaacaatataaattctttagaaatgatgacagaacataataccttttatctttgtgatgtaaaataaaaaaaataaatgtaaactagttttttaataatagtagttgttggacgtacatattgatggtgcaagtagaggaaaccctggattatctgcaataggcatcatgataaaaaatgacgacaaaataataaaagaacactgtgaatttataggtatccggaccaataatcaagcagaatatgaagcattacggcgagcacttgaaatctgtacagacatggatggtgaagtaaatattctatcagatagtgaattattaataaatcagagaaacttaaagtacagaatacgaagtcaagaactaaaaataatttccagagaaatttcaaatctagaaaaaaactatgataagattacttacaagcatattcctagaactaaaaatagtcgtgcggattatcttgcaaacaaagctcttgataaatacgttgatgcaaactcaaagaaggcatgaccattactaatcaaaaatttttcgcaggttatgaaaccagtattggtaaatactttaacgtatgaacgtaactaatgcatattacactttagaatcgaaaaatcaaataatcggtagataatatacagatgcgtaggcggctatgaggaatcagagttatcacgtatacaatatgaagagaaggcatttgactgagccgccaaaacatttggtatttaaagagcatttattttctttacgattgtaaggacatcttcatcaataattttgtgttctaagcctaccttttgacctccaaattttacgcttttgccccatacctgagcgaacttaaagtctctgaccatgtttctgtgaatcttgttacaaatattctggacagtactattccgaggcataattagaggctcttccaaatcggcatcttgtcccttgggtttcatatatattcgaacaaagtctaatttattgtagatttcccgtttaagaagttctatgttcttgtttgtgtctgccgacacagctgtatatggaattttaagtttagaagttgccatcttgagatattctgtatcaaccaaatctattttatttataactgctaacgaagggatgtaaacccgattcccggataaaacatctattaactggtcaatagtaagacctctttctcgtatggtgatacgaccgttgtggatcccgtttattcgcatcacattcctgataaaattttcatcagcttgtattggaacctgaatatttaccgaaatacctcccgtagcagtcttttctacaataatatcaggaggcttttcatcaaccttgactcctatttccgatagttccttttttatgacctcatgatggttaatctggaatacatctaggacaatcaaaactaaatctgcatttctggcaacagataatactctttttcccaaacctttgcctgcagcagcaccttcaattatacctggtaaatccaaaatctggatccgtgcaccattgtagtctaacatacctggaacagcagttaatgtagtaaatgagtatgctgctgttttagattttgcgtttgttaatgcatttaataaagtcgatttccctacactgggaaatcctatcaagacgacagtgccatcgccggcttttctaacgtcaaagcccgcactgcctcctccagtagcgacggtctttccatgggtattttcctcttgttctttctttaactttgctatcttggcctttagaatgcctacgtggaactcagtcgctttgtttatctgagttttgtgtatctcatcttgaatagcctggattttctctggtattcccattggttttaatattagtctataaaaataacaataaaaattttgttaatagtgtcttagctgtcccccttagttatttcaataccataaaaaatttcagaccgtatactactgcaacggtggtaatgaatcctagcattcctaaccatggcaatgccggaattttgggggttttaatttttatttgatgatcttctacaatatttgtgatgtaatccttgacaattgaatgccataattgatattcgatacggtgtttttttaagatggtctcaatttcatataccacaggaactcttactgattttatatgctgtaaataatttctagagatttcgacctccgcatggattccaatcaaaccttgattaaaatctaggagtcttacatgcatttcccatggtttttttagtttttttgagaatccactaccaatttgagtaggctttttatgttcaaattttaccattttaaacccttcagaaactaatgtattgacaatttcatcttttcttattttaaccatcaaaaataaatgatctcagctcgacctcttctcttttaataaggttctgaatcccttgtagaagattcattcttctaggatataatgtagaaaattcagccatcaacatttttctccaattacaattgatataatattgtttgactatttataatttaaaaaattaaaacttttcaaatatatgatggagctgttctctttgaaagtcctcgtacataaatgtcaaatttgctatccatgttcaaggtatcactcgagacaggattgtcagtcatttttatatttaatccccttattattatgactggagtagacgcgtcagattctcccattatcatcgtcccgagggaagccagacaatcggcaagattttgagatgtatattttagaacatttccaaaaagatcaaaagtccctttcaggtctattactggttcaaacccgcagcaagctaatgcaacgcctactgtaccttttctcataggtaagattctactatccgacaatattatcccgacccttttcaaggaatttaccaaaaatttctgtttgagggtctctatggagtggtacggatattttggatacaaaacaacactacctttgggcacatttgacttatcaatgcctgcattaggcgccaacactttatgaatagatgttagaacaaagccatatagtccaccaaaaatttcatctgactccctgagaattagttccatcatttttggatctatgtgataaagtttagatgcttgaatagcctgactacttggttttatcctagttaatttcttgatcctaccttcacttatcgaaagatatttgcttgatataacaagcacatcgttatcttcgatgtttatttttcctatgttcttgctaattttatcatacaaatcaaattctgatgattctctatctaggtggatgggaataacttccaaattatggtatttctcaaaacaatctatataattaattttattctgattgactttaaattcttcaaaagctaaattcaaaaagtattaatcattaacagtcctatttaataatattactatgggaatgacattaaccgaaaaaatcctagctcattcctcaaattctaaagcggttactcctggagacatcatcttttccaacgttgataaagcgatgattcatgatgtatcaggtcctggagttatcaaggtgtttaaggaattggaaaaaaagggctataaattggaaaaattatgggaccctgataaagtatggatttctgaagatcactttgttccagcctccgatagaatttctgctgacaatgtgatacaattaacaaaatgggcacaaaaatatggtattaagaaacacttcaagtatggaatgggacaatatggcatttgtcatacgatttctcatgaagaggggttagtgttacctggagaagtttatgtgggtggagattcacatactaatactacaggtgcaattggtgcttttagtgcagggcttggtcatacagatattgcctatgtcttaaaacatggcaaaatttggtttaaggtaccagaaactatgatgtttaaggtaacaggaaaaaaaccagattatattatggccaaagatattatcttgaatattatttctgatatagggactgatggggcaaattacaaggcgatgcaatttagtggtagtgttatagatggtatggaaatggaggaaagatttactttaactaatatgacaactgaggcaggtgcaaaaaacggaataattgaaccagatagcactactgtagattatttaaggacaagactcggggcattagatttcaatctaattaaaggagatccaaatgccgaatttagtgaaatatttgattatgattgcgaaaaaatggaaccttctgtggcaaaaccatactcgccggagaatgttgtccccgtaagagaagttcaaggcacagaaatagacaaagcctatataggatcttgtacgggtgcaaagctttctgacctcagatctgcagccaagatcttggaaggaaaaaaagttaaagtacgaaccgaggtgctccctgccgctcagtcaatctatatgaaggctattaaagagggcttggttaccatttttatggagtctggggcagttattggtccacctacatgtggagcttgttgcggtgctcatatgggtgttttaggaaaggatgaaatttgtgcaagcacgactaacagaaattttccaggtagaatggggaatgtaacgtcgcaaacatatcttgcctccccgatggttgtagctgcgtcagcgattaccggaaaattaacggacccgagggatttatgatggttttaaaaggtactgtgcataaatacaataggccgaatatagacacggatgttataattccaggtccgtatctaaaaattcatgatcatgacgaacttgcaaaacatgctatggaaggattagatactaattttataaacaaagtttcaaaaggtgattttctcttggttggtcataattttgggtgtggatctagtagggaacatgctccaattgctctatcaaaaacgggcataaaagctattttgtctccatcttttgcaagaatcttctacagaaattctatagacggtggttatttactaccaattgaaattgaagaaaatattttggaaaaaatagatgataaggatgaaatagaaattaacttagacacgaatactgttttcaacgttactaaaaaagaatcttatccaatcaaaccgtttagtaaaataatttctgatatcatagaagccggtgggctttttaactatcaaatcccttgaaaaatatcaaagcattcaattaaaatatgaatactttttaattttcacaaaattcaaagaagctagtcgggatgtactttactaatgtaggaatttgatgattgcaatatgcttacaggatctaagtactcaaaatctaatttattttgggaatgataaaacataatctgtttctttctttcctcgtctataacatctgagttagagtagtatactacgagctcaaataaatccaactcctcaaatcgttttacatggaccatctgtatatccccgtgtttaaaacacatcgaatgtgccaaagcacatgcaaattcaaaattcttgcctctgaaatcctcaattacaagattcgaggatatcgtttcaagcagttcgattctatttgattggtggccgatatcgtaattattttgcatggtttcacctactattttgttttcaaataatatttttatttcacattcattaaaaaacgattccatcatataacaccggctctgctcattaaagaatgatgcagtctccaactcatttatcttgtggaattatttactatcttctttaatagtctttaaaacttgatatgaaatagctttacaagaaaaaaaatatttaggttgaatgatcttcaaaaaaccggttgtaatcgaaccgattgaaatttctcatactttatttgtcacgagtaggttccagtcaagtctctatatacctcaagtgcactttctatattgttatttgcaatagaatgaaatacttttccactaaaagaataactaaccaaaaaaggttcatttgttataatacgcaatccattcccagagaactggacactaccggtgtttttgggctcgtcaagcagattagttggaattaccgcagtatcgttaataggaaatgtatatagtgttccaaattggacaggcagtttcaagctattatttatagtcaatatgttcaacgattgcatttgtacgggtttactcgaagtaaaagtcaatactcctgaataagtagtgctttcatttttaaccgggaaaataaaaaatgattgttccagcccagaaatgtgaaagatatcctgatttgaggaaactgttccactaatagaaacgtcctgagatccttgactggtattattcacgctaactgcagctaaaacagaaagtgaaaaacctggtgttacatcaataaaaaaaattactaagagtacaattagtgtgagccttggcatcctaaaaaatgaactgcattggcacttgttgttgttatagattgatgctttgatcattggactaattaaatatttgattctatggttgataattaaaactattagaatttattgagttaaatcaacaatgctcttctgaattacttgcttggcttcatttgaaatattataacaatcaagtattctttttgggctcctaatcagtcgtttcctgaattcgggttcactggctgccttaagtaaaatctcgcttataacttcagcttctatattgatagaactcaagtagttcctcaagaggaattatattatatatacttttactattcccctctgctttttatgaaccaataatctatctatactctttgatttagcattaacattatagcaatccaataattaaaataatatcttatagaaatgatgaatgtaaattcttattgaaaactacgtctcaattattattgaaatctcaaaaaaaatggaatgcgatgggtacatctaggatccagccagtagaacaaactttggaaaaagtaaattccttgattcaggagattgggattacaagaattgcagatattacaaatatggataggcttaagatacctaatttttcagccgtattaccaggaactgaagactacatctgggtatatagtggaaagggtccgacgaaaaaccatgcaagggctagtgttatcatggaaagcattgaaaggttttcatcattacctgcaaatttcgacggaaaaattcaaaggggcacttttaaagaattatctcaaagttataatgttctaaaatatgatgaagtagtagaaccagtttcattccacttgaatgaagaaatgataatggattattgtatcggttatgatttattaaataatacagaagtattggtgcctgccccattaacaattttcagatatactccgtcgccaccatccataaatccttactccttcttccatactaatggactggcttctgggaatgtaatcgaagaagcaatttgtcatgccctatgcgaagttgtagaaagggatgcagtgagtttggcggaattcacttctagtgcatttcagtatcatatcttgaaaactgttgaaaattcgctcgtaaagaagggttttcatttaaagtcaattgactcaaagaactttatggatgatgattctatttatcccgaaattgatctgaacagtatcgaacacgttcctattaagagaatcgttaataggtttaggagttctcaaatatccttgactgtaaaggatattacatccgacctcggaattccaactttcatagcaagtagtgccgagtgggttaatcatgaatatggatatttggtagaaggtcatggaactcatccagatgcacgaattgcacttatgagggcaataacagaagtatcccaatcaagagctgctaatattcaaggttcgagagatgatctaagaaagatgaaatatgatcctgaaaatagtgatgaaaacagatcatggcaattcataaagtcaaaagaaataaaatcattttcagatgttcacacatttacctatgatgatatactggatgacataaaacttatactgagtagtttaaaaacaaaaggtctaaagaaagctatcgtggtaaacttgactaattcaaaattaaatataccagttattagagtcattgtccctgggttggaaacattcaaaataaataaagcagttatcggtcaaagagctcaggaaagtgttaaaaaatggttaggtccaaacctgtaatatttttaggaccgtctctatctagggagaaagcaagaaaaattctagacgcagattaccgactacctgctaaaaaaggggacctgcttcagttgatactaaaagaagttgatattgttggattggttgacggatattttcttcaggattatccccctaccccaattgaggtatataatttagtccgaaaaaggaatgtaaaggtttttggatcatcgagtttaggtgcacttcgggcggtcgaacttggtaaatacgggatgataggaataggaaaaatttttagactttttagggatggaatcttggagtctgatgatgaggtagctgtgacgtttacggattatacaaattacaaatcagaagcattgattgatattagatacaatttgtttttggctaagaaatacaagatcatagacaatgagaccggaagatcgatccttaaagtatcaaaacagacctattttccttataggacttacgaagatattttggacaaatgtaaattaaagtatcctgaaatcaattctcaggttgaaagttttagaggttatgtcctgaataataaaaagagtttgaaggaaagagatgctgtgcgattattaaagcacatcaagagtgtcaacgaatcttgacaacaataaagttaattttatattcgctacaatttaactaacagtactgcgcatgaataatatgttgaccaatttttttcatagtattgattcacattttatttatatagtatttttctatttttcagcatttatgatgctgtatataacaatgtttggaatgtattggagttgggtggaatatgataaaaccggtgcattaaatataggcgaaacaatcgtaaagaacgatttaatctttgatggatctggcaaattggttacttatcttgcaatattctcagttatcacatggttttgtgtcaccaaaatcggatatagcagagtacaaaatacacctaaaatagttcgatcagtattatctgtatttgcaattatcttgatagtcatttcagcttatgaatttacatacaattttacggtgtggggagcgttgattactgtacataccatcaataactccttgaattttgatgaaatcaatataagttatcctaaccctgaaacaccctggaatttagttttcgcaactaaaatgactcttgcggctcttataatttcctgccatgctttttacatcattcaaagatcagacaagaaatcatctatttacgtgaaagaacagtcctaaagtacttgctccatcctccaatctccatcctccaattccccccaagcctctctattggggccatgtaggataaaacctggattctattgaaaaaataaatcaaaatttatgatcttgagaaatcaaaagtatttggaaattgctatccgcagaacactagaactgcttaacgccgtactcatttcaatattttgatacatagtatttttaagttgtttcttgaattttttctttcctggtgttattaagagaatcacaagattttttattatgattagaaaactattgatagtgaaaatcggcgtaatctcagatacccatgatgatattgaaaatactgaaaaagcaataaatatttttaacatgatgaagataaaccatgttttccacgcaggtgattacgtttatcccggaatgattagtttattcaagaaattagacaaagaaacaaaattttatggggttcgggggaacaatgatggggaattaatgggtatcacaaggcagtttggagaaattgaaaatgctctatttctaaacgaatttggaaaactcttgatttcatcaaaaaaaataggcatctatcatggaacaaaccctgatttgtcagaatccttactggaaagtcaactattcgacattctaatactcggtcatacccatatcaaaagaattgaaaaaataggaaaaacccttgtgttaaaccccggagctttgaaccggaatttcttttctaaaaaaactactgacgatccctgtgtaatcgtctatgatgaaaaacggaaattggcagaatttataaacattaatagtaccaagaataccgagtatgactttggaaaatgatttgaactttgcactttgattccttatatatcagcttaagagttttccatagtagattcatagtacaaacgcaagaaaaacaacaagaaaaatattagttgataccaggtgcttctacgattaaaccactcaaggtaaataatatataaaatcattgatatggtaccttgttatcacatgaaccgagggaaaaagtggaattgaacgaatcaagttctgataaaaacagtaacgtcgataatactataaaagtaaatgataatcaaactactcaagctaaaaatcaaactagtcataatattaaagccgatgaggaaatttcagatgagacgcttgctgccaaaagtccaacgaatcttgataagaaatatctcaccagtgctgatctgaagacgaagttaacttcaaactatttttgcttcgattgcggagcggtgttgactaccttagaagacaaaaaacaacacgaattattcgaaattgaaacaaaggatcgaaatgatttagagaatggtgattaactaaggaatgaagcaattactgccatacattattgtttttattcgctgtaatatttagggacccgcccttcattttggattgttatgatatattagttaggtatcattatgttcatatctttgaatatctataactactttatccccaaccttgatctttagatcgtcatattctttcatggttactttgaaagtaggggcatcgctgactacgcctccaccaaacatattagagatatttgacatggctttaggcagattcttcataaggtcttcaggagaagtaaaagccattacattggaaccaaaaggattcatttgcttatcaccagattttaaatattcattaggatccttgaatgatacgtatatataaggagaaccatcagtggatgcttcaattttggcaactatgaattcttttttcatttatatttattagtgataatcgatataataaatatttaattctaaaaaatggcgctgttaacttaggcgtttggcacctccttgttgtgtatttttacaaatagattcaaccagtttttgacatgatctagtttacacttctctttactacatggaaagtaatcgtcaaatccttcagttcgatccttgatgtactgcatagttctttcaatcagacttttctcaaacgaagaattgatatggtgttttagttttaggaatctacaagccattgggtaccaggttccaccgtctgttgatacgacatgttttccgtgaatcttgatcagacctgaaataaatctctctgcgataagcatgttcctctccttggatttattagctaagaaagagtgcgagaatttgcctattttctggttcgattgctgcccataaccaggagtattctgagccgacttttattaatgtctcatcaatgaggtattctgatatttttgttcttcttgttgaaaccttttgaggtttatacctttgaatccaattccaaattgcaacgtgacttctattgataatatgtaaaaaggacaatgccttggcagtatttctaagcgataagccaagaaagtacaaatacagaccatagtaaatatgctctgaagatgttttagttcttttacttaacataacagaaatagagcgtctttaagctaaagatttatcgttaagttaacagggcctaaaaaattaagagattttatatatatttccactttctaaggaaacgatatatatatctccatctggacctgtttgaatgtccgtaatgctgccaaatcctgttcctaaaatgtaactattcaattcttcctctgaatcaataatagcgtcctgtatttccaatccgtctctttggtcatttaatttaaaaaaatacaggttaccattattattatctcctactaaaatattgttggtgtagtcgggtcctaggttggtactattgatgaattctatgtctgtgatcgcagtgggttcaagccaacttatctctggatctgaatagttagaattgggtgaaaggaagacaagatcttttatttcgtcaggtgatgcagttggacccattattgatctccaaccgctattaaatccaggctctacccgatttatttcatcagaaaaggatggaccattctctgtgtcccagacatctccggtaatcggatctacagtaagaccaaaggaatttctaataccgtatgcaaaagttttatcaatattaggaacatcgctccctacaaagggattatcgacaggtgcagaacctgtatgtggatcaatcctgtaaatagaaccagtatagtctggatctcctccattctcaaaattctgtaatttagttctgtggtttaaatcccctattatggcgtaaagattgttgtccttgcctagaattatcttaccaccattgtgatttggtccaggtatggcgggcaaatctaagatcaacttttgattagtaagatcagtaccatcccattcaaaactatacactctattacgcaagttctcattggggtctgtcacggtttgatcagcgtcgttttcggtaacataaaagaaaactactgtggtgttattttccttcattacttccactcctaataacccgcgttcactttcaaaattgacgtcaaattgcttcaacggagtatcctgtaatatgccatctgaaattaattttacgttaccttttttttcaattactatgatatcctttccagaatcgtcaagaaatgccattcctgtaggcgacgtaaaacccctgtagactggttgcaaactgaggttcggatcttttatagtctgagcactaatcaatccaatatcaagtgacttggactgggtgatcaataaaatcaacaagcaggtccacacggtcaataggccagtacagcataaagacctaagttttaaagccattgggataatatttagaacatttgatataaattagtattatttttcgttcaaaatcgtagaatgagtttggttatttatgaatcctttagtgatttcgcccaaataaatcatctaggtttttggtcttaacgcttctatggggcttaccttcgatgctttccaagctggcaacaatcctgctattacacttaggacaacagagattatccatacagtaatcatgtcgcccataaaaaaaaggggaatgagtggaggatcaccttcatttctgggggtagcttgagacagtgcatacccacctcctacacctccaattaaacccagagttgcacccagcatacctattatcaaagcttcaaaaacgaacattgttaaaatgttagagctttgtgcacctattgcttttaacgtacctatttctctgattctttcaatcacggaagtatataatgtggtaattatgcctactgcaccaactattaatgagataatggctatgctcaacaagaaggatgtaatcccccctgtaaattgctcaatggtcttgagtatggcttttactgttgttacccctatatcatttccatacaatttcttaatttcgctttcaacaacatcaactaactcattggatgatgctactacaaataaagaatcatacttgcctgatttttgaaatagggaatcgcctgcatccaggttaatgactgctgcattgtctattgttggattgcctgttgattccattattgcggtaaccaaaaaattcttaggtattgtgtcttgtttgccagttgtgtcatcaataaatgaatattctaattctattgtctcacccaatgttacaaatgggttgtcttctccaggaggtttggcaatattttctgcaattacaattgcagatggatcattttgttttatttgagaaccctcttgtaaatcaagggtcggtgcaattacaaataatttatttggatctatagatagtgctgcatttgttttttcttcacccttagatttgatcaatacctgagactgataagatggtataacttcttcgataaagggcaatgaattaattctgtttatgactgccgcatttagtgttatcttggaacctgcagagcctcctccgcctcctccgcctccaccgcctccaccgccggagccaacagtacctgagccctgttcttgaccacttgtaacaaacaaaatgttaggagctaaattactaaactgtttattaaagaattcagtaaaccctgctcctacaccatttactgctactagtagactggtccccgccataaccattagaatggtcagaagagacctgatttttctctcttttagtgcctgaaatgataggacaaatatttccttaatgtccattgactctatcactactcactactcgttcataactagatccaaaccttaattgtggtggtgaactaccatgaccgcatctcaaaactttaaagtataacatcatgaaaaaattggtatttaggattaaaccgaaattgaacttacacaatagaaggattctatctctaattaatgtggatttataaatttgatgattctttgttgtctttatattttgtgtcaccagagcttttatccgtgttatcgtaatcatcacaataatcgctattatatacaacaaaatagacttaaagttatctaaggtatgatgaaaaaatgtagatttacttaactacatgactgaattcacaagaaaaatatttcaggtaactatgttttcttcccgttctatttccccatccttgagatatattatacgatcggttttaattgccaactccggattatgcgtgaccattattatggtcctatcgtacttattagacaacatcttgagcaaattaaatacttcattacccgttttagtatctaagttaccggtaggttcatcagccaaaattatggagggattattcattagggctctagcgattgcaactcgttgttgctgaccaccacttaaattgaatggtttgaaactacctttgtcctcaattccgagcaatcccatgatttttgaagccctttctaaccgctcctttttatttaatcctgatattatacatgggatttcaatgttctttaaaacagaagccctgttaattaaattatatgactgaaaaataaatccaatcgcattgtttctcaaataagccagatcatgatcatttaaagaaaatacatctacaccattgatataaatatctccagatgtcggtcgatctaaagtccctagtatgtttagaagtgtagatttaccgctaccggagggacccacaatagccacaaattctccctttttaacatcaaaatcgatattttttaatatcggtgtttctccggctgtcgaagcataacttttgtaaattcgatcaactttaaggattggatcagaagaaggagatgaagacgccatttaagatttcaattctatattattactcatatagctatataaaaattgaaaacagttaggtctatcaaaggatctttctactgaattattcacattacaaaaattgtggttttcatatgtgaaactaaatgtattacttttttcctctgagtggatacaaatcatcaaaatcccattaattgaacaaataaaacgattcatttctatcgactagacctgaccttaggttttatacataagataacggataacaggatgaattgatggatagatggataataattgtacggatcctacaataaaccaaattagtcttgtttactcgtggtagattaggaatctaaagtgtctgcatcttttcttttcttgaatcaaaacaagattagtttttgtggagatatgaccagatttgacagttgcttcaaagcaatagtcaaaatttaaatattgtatagtaaaatataatataatattcttatgaaaaaaatttatttaataatattatatacttttatcttaggaggaatattattaaatttcgaaagagacgttatgtcttatgcccaagagaatgttgatagaaacataataccgttgcttattcctccatatcagatgattaaggatcttgggtcatcagatttaaataggattaatgtaacctatgtcaataatattccataacaaatagatagtttatggtaccgcataaatttctaaattaataatatagaaatatttatcaaaatccattaatatgtaaatctaataattcaattagacatatgaatcgtggattgaatttttatgctattatacttgtgacaatagctactctagttttttctgttaatgaatttggagtggttcatgcaactactggtattgatctaggtaataatccctctcaatctaatcaagtacctgatttaaaatctgatccaaatgacaacgacaataacaataacaataacaataacaataacaataacaataatgacgacaacaataacgacaagagcagcaataacaacaataacaataatgacgacaacaataatgacgacaacaataacgacaagagcagcagcagtactaccactaccactactactaccagcaaggacgatgtgcctatggctttaccatttaattcaaatatggccgatgaatctgatgatgagaaggattattcaagtgtaatccctttcccatgattttaaaaatatccgttttaatgtgttagccgattctatgtcttattcattcattacgtgattattcgatcctataaatttcccatgtcctaaattttcaggaagtaccattccattttccataattatttttccccttgatatggttgtgatgggccagccttgcaatttaatcccgtcatatattgtgtagtctgaggaagattgcaaaaggtctggggttactttttgtaccaaattcacatctataataactagatctgcatctgagcccttttgtattgtaccttttttaggaaacattccaaatatctttgaagtattgtaactggttaattctaccaagcgctgtattggcagttgtcttagatttacaccataatgtagtaagacgggtaacatagtggccactccaggaaaccctgctagtgcggtccagatgtcattattttccccggactttaaactcaaggtattcgcaacgtgatcggttcctatagtatcaattactccgttttttatagcactccataaactagctatatcattcttggagcgtaaaggtggtacaaccttgccccttaaatcaccaaaatctactgagtgagtcaaataatgcggacaggtttcaatataggcattacagcctccaatttgcctctcagttagtatagcatccaatgcaccatttgatcctatatgaacaaagtaaatattggatccaaattgtctagccatgttcattatcttttttatggctattacttcgctctcgggaggtctacatttagaccatatgtaaagtggattatccttgctagggtttgttggattattttttatattttctgcacctgcatctaaagaactactatctgttcttgacttttctaatttcttctcctcaatgagattcgcacacgtattatggtcttctgcgtgtacgagaacaaccgaattcttcaatgttgaagacttgccgacgacgctattacagagttcatctgaaatgaacacatttttcggtagacgtaaatttctatgagggtacatatccatcaatatcctattatctgtcgaacctagattcatgtagagtttgaatgaatgtatcccactttgatacaaataagaaatatcattaatttgatcagaatttagtatcgatgcatgtatgccatagtctatgaaatggttccttgcactagcttctagatgcttggatatttcatctttatatgattcatatactctaagcatccgcataatggtggtcaccccaccaaccgcagcagatttggattcggttgctgcagccttttcaataggtgaaaataccccataatgtacgtggggatcgattaatcccggtaatacatacttatcatttgcatttattgattttgaataatttacactagctgatgaattcgtcagttctttaatttttccattttctatgagtatgtttgttcttagaactcctactttaggtatcacagcatttgcattctttattattagatcgcagctattactattgatatgatcataatcgttactcattaatatcacctgatgagcgaaaaagattgcgtctagccaagttctctggtcagattcgggggattttcatagactttgtatcggtcattctcgagggcacaataacaaacatttgcaggttgtacaaagaaccccgtctcaataatcccgggtattttctttagttctgtatccaattgaagaacattagaataatcattaaacatgacgtctagaataagatttccattttctgttatatagggataacccctctccaaagttctgagtattgggacaccatttaatttatccaaaaaaggtaacgttgcagttctcccaaatgggaggatttccagaggcactgatctcgaaaaacgcggcacaaattttgagatgtctccaacaattattgtttttttagacgagtagtataagatcttttcacggaataaagctccaccaccaccttttatcataaagaacttgctatcaatttgatctgctccgtctattacaatgtctaaaaaagggattaatgattcatcaactacgcttaatttcttcctctcggcttcaatttttatttgtaatgaggtacaaataaatttacacttttctattattgaaggtggtaacagatttacaattttagctgaggcccgcccactacctaatccaataatacgcggtttattggataaatgattttcaatgatgtgttgggcaatattttcaaagcttttatccaaaggggtattattttgagaactggaagtgggagaagacataattctttatagtgaaaatgatgaaagtatatttaaatcgattgaaacgcgcgaagcacttacaactgtcgtagtcaagatactattgcaattcctatgttcgtattgtgattatttatgaatcccctaacctttttaatgttttaaggatgtctttttgtattttgtcaatctcgtttaagtcaatgtttctattcgcggattgcttcgaatccgggggaaccggtgaaaccgatgatgttcctatatcttcattgatttgagaatactctttattcatatcattaattgatcctcctgtttcttccaatccttctatgccaaatcctagttctctcttgttgtcgctatcactataactatcattacccctaccaatctgtgaaaatgattcattctttttcttgttacccgattttattgttttaatcttatctagtatcaaggcaggttgtttgaggtatgcatctaaatgggttttatccttatccttatccttaaaattttgttcattattacctaatcccaaacttgttagcttcgtatctattttttttacataatctgataaaattgaatttaactgatttctatactcgtatatttcctgtacctctagtattgggttaagctgaaagacccgtttatcatactcttctaacagattgatatatttatgcgatagcctgtccctttcatactcgtctatttttttttcatcaaaatgctggttaatcttgtttaaagcttctaaagcaactgatttttcaaagtaaagactgcttaactcatactttacattgccgagaatttttgaccgactctctcttcttattttaataatttggaagacaaaaagggcacaaattatgcctaacatggttgaactggcaactatgagtatctctatcatgttaatgctaattataatgacatgttggtttataaaaataaaataatgttaaataagtaaaaattagaaggttattttactcgcctttttatccatttatattttctgagctttggatcgggatatccacattttgaacaggttttgccacgtttgtgaaatgaattatgtccgcatcttctacatctaatatgtgtcttcttgcgggtaaatttacccatagatgttgttccttttgtcaattcattttacctcaaaattaattgtagttatttgaactgagggggagaaattataaccacattatctcctctcacaacgatatttccaatttcatctgtctttccttcttctaaaatttccacagaactttctaataataaattcatatgttgatcaaaaccttgtaagtttcctctaataaccttaccacccttcaattttatcaaaacatctctaccgaggctttcatcgaggactttaactgccatatctactgacaactttatctaacctattttctatcaaatggatgtcctatattaaatttagttttttcttattttatacaaacataaagaattacctatagttggggtctgtaattagagacgaaattttttctattacctgggaaagcattttatttcctactgtggaattggcatttaagggatttccccatattccatttttagtaaatttcgtaaatcctgctggattgttaattgacatgtttgtacccagtttatacaaagagccgatttcatgatattttgtatccaatcctgcctttgcaagatccatattaacaagatttggatgtatagccatcatgagggaagtttctacctctcctgcatgatcaaatcctgtttcaagcatttgccaatagttaataaagtagaaaaagtctgaatttatggcatattttgataataaattctgtccgacatattgtaaaaggccaatattaccatgatgtccattgattacaaatatacgtttgataccgtgctttgatagggactgacaaatacaagagataaagtcaactaatatgttatagtctattgagatgttaaagagtggttcatgttcataagatacgccatagaaaagagaaggaagcaataatactttcgatttgattgatacaatgtttgagatatgttctacaataagagtatctgtcgaaaatggtaaatgatctccgtgctgttctatggaaccaagaggtaaaatggccgactcgaaattgaaatcttttatcaagctggaaaatttgttttgattgatattcttgatttccattattaatttaattaggatcgttgcgctatgctataaaacatatttgattatttataactgactttgccccaatagatctctaatttatcttctaaaaacagctttactgcttcaagcagtgcaagagcttcagcaatttgaccttttatcttgatagattccaatgtgtcttctgtcaaaaccttaaacgattcttgaataattatgggaccttgatctagatcttctgttacaaagtgtgcggtacatccaattatttttgcacctctttcataagcttgtacataggcaaaagctccgggaaaagcaggcaataaggatggatggatatttatgattctattcggatagcgccatacaaaattaggcgttagtattctcatataccttgccaaaacaataaggtcaatgtcgaaattttcaactagttgtaaaatttcattttctgcaacactttgttccacgtggtttacaaaatgaaatggtatggaaaaggaatctgcaattgattttagcttttcatctgagccaattatcaaagagatattgcaatttatttctccagaggcgcgagaatttagaattttcaataagcaatgatcttctctgcttactaggattgcgacattcttgactttgttctcttcatgaaagtgtaccttcacttccatggctagttttctgcccagctcatccaattccatttgcatctttgatttatcaatcgttggaaatgacgcctcaagatgcattccaaagagtccttttactacattctggtttatcttttcaatgtttccaccgtttctaaatatgtagttagttgtatctgctacaattccttctttatctttacccacaatagtaacttcaatatgtgttttagtattttttgaatctgtgatatttgtaccggtatctcccatttatgatgaaagatattaattatccgagataaatgtgatgcatctaaacacgtgtgtaaacatacagtttgctatcgtgtctatggcagactgcttaaatttgatgtattgctgcccgtcttgcttacttgccaaattgcttgcgccacaaaccaaatgacctaacgatagtggaaggtgtgtgcgaaaggaagaagcaaaccatatttcaagacaatagagttttaatgcttcaattatcacatcaggtgacagattcgggatgagctttgacaataaatataatagttttttatttagtaaaaatttgatataagatagtagtatatttattttaagaactatacatattatacacattaccttaacttatgatgtttacattaaacaataaaaaaccacatattttagctgtggttgcagtggtgacctttgcactatttttgagtcccactttagctgtgaatgacgttttggctacagacaagaaaaacaaaggaaatgattctgatcaagacatcgatcaaggtcaatcttcacgacaaaatgcacaatgcgtctctggtgaagatgtgatagcatcttgtaacaatttgagcgttcaagaccaggacaatgatggaaataacgcagcagggcaacaaaatggaaaaggtaaaggaaatgattctgatcaagacatcgatcaagatcaagaaagcaaacagaacagtcagtgtgtagcaggaggtagtattgctgcatcttgtaacaatttgagcgttcaagaccaggacaatgatggaaataacgcagcaggacaacaaaatggtggagataacaaaaaaggtaaaggaaatgacggagatcaagacatcgatcaagatcaagacaataaacaaaatgcacagtgtgtttctggtgaagatgcaatcgtatcttgtaacaatttgagcttccaagaacaaatcaacagcggaaagaatgcattaggccaagactagctaatctcttccttcaattttttcatttcagtatctgatttttgctttcatttttttttcttatattctataggattaagttgtattcaatctttgaatttattatgaaacaatcaatatcgttttcatctattcatctgtcggtctagtatctgtcttctgtttcttttaaagaaattaccttttaaataattaatttgtaattatttaggtaaaaattttatatccttttacaaaggatcaatttaatttattaaaaggttgaatttattactaattataaaatgggtagtagaaagagaaaaactgcaagaccagtacgaaaaacaaagtctactgagggacgatgtccaaaatgtaagaccatagtaagattcaatgtttctggccaagtgggcagcgagatctatgaatgcataggttgtactacaaagttcaatattgatgagctgtaattaaaaatagaatagtttgatgacagaatacatgaagttatatcacggtaatgtttttttattgcaaaatttttatgtatttagtgtctaatagaatagaatatactgataaagtctatctatacagcagcgggatgcctgcagaattgatagatagaagtaaagaaaaattaaatgaacatggcgttaatcttaatgatttgatagtaattgaatcaccagaaaatgttcctgagggagcaattatgataactctctggccacactatttgtcagtcgcaaaagtaaagagagtcagagaagggtctatctatgcacctcagttatttaatatagatttgtagctttacactacagcatgtttttaacctttttttgcaaaagagacaaacataaagaatgtccgggtaattggccaattgacgagacttgcggtccagacgaagattgctcctttgacatgaaaatgacaaggtgcgaatgtgactgtcatgatacaaatacacctagctcaaatagagtagactaagaaaaaacctagtctttgcttgactctaaaaagtggttgtgccgaccatgttggtaagcaccttgtgtagtagattaaccactaaactcgtcgaacaaattttttacataaaatcgaatgttgaataatgtcttaatttttatctcatcattggcaaaaaacaagaaataataatatgttttaaagcaatacaattacaactgtattaacgatggaaaataaatataataatcatccaggtagatctgtttatcatgacaagtgtatcgcatttttgaatatttctgaaaagattcgctatgttggaataataaatagatttggtagaacattatcaggcaagctgcgaaagaatgtgaaaccattattatctcccgaacaggctagagatgaacactttatcgaatctatgagacaacaacttcgaatttcctttgagtcatcgattggaaaaaccatattctctattacaaaaaatgaatttgttaccctattattagttccatctaaaactagtgatgatgttatatattatgtaactatagacaaggacgtttcacttgacgaagtcaacgacatcataaataaagtaattgaaatagaaggataaaaagaaaaaaatagttttactactaatctaattagttaaaatttattctacttctcatttctttatcctttatgatagctgggtgatttgtatctactaatattacttcaaaccaagaatacattccgtcttgataaagcaaatatgatcccatcactcttaaattcaggtatttttcattgacacgtctttcggctacccttttcatactaatactttgtttgatgtgaactacaccaatgtgttttggccttctgcctgatacaggacgttgttttctcattcctcctcttccaacacgaattcttaccacaattatgccttgtttagccttgtaacctaatgctcttgccctatctatgcgacttgggtgttctatcttatgtattgtgggttctcttctccatacatacgctttattctttatttctggagatctcgttttcaacattgtcttccatgtttccgcaatatggctgtacatgtttttgctttgtttttacccattaatattttatttgggtaaaaaacaatcaagaaaagatgataatggttaaattataaacttgattaattaaataaaatttagaaaaaacagagaatggcaggcaggattatttagcgtctatgcattctttctggctttttctgtcctggttgaatccttttttcaaatctttttacgaagttattcttattcctaactttagatgaagggctagttctttcacgtgcttgtattttgggagtttgacctctaacctttccagctttagttaatgatccgtgagtcggcatgagctattaatattgaaactcatatttattatatgcattttgaaattagaatattataggcaacaattacccgcatagaaatattcatggcaatcaaatactaaatcactattatttaaattgaagaatatcataatttgttatgcaagtaatgtcagtattgaaactagaatacgcggaagaaattcaaagactaaagaaagaaaaaaatgcaataattctgtcgcataactaccaaatttctgaagttcaagatatatctgactttattggagattctcttaaactatctagattagctggggaaacagatgcttcaattattgtattttgtggcgtccatttcatggctgaaacagcttcaataataagtccacacaagaaagtcttgatacctgatttggaagctggatgttcacttgcttcttctattaatccacaagaactcttaaaatggaaaggggaaaatccggatgctatggttgtaagctatgtgaatacatctgcagagataaaagctttatcggattattgctgtacttcttctaatgcagtaaaggtagtacagagtattccaaaggagattcccgtcctgttcttgcccgacatgtttttgggagcttatgttgcagaagtaacgaaaagggataatattaagatatggcccggtgaatgccatgtacatgctggtattacagacaaagatatcaatttaatgttgaaaaagtattcaaaagccgaatttttggtccaccctgaatgtagctgtacttcctctacactataccacgtgtctaaaggggatatcaacagagattgtaaaatattatcaacagaaggaatgatgaaagaggctagctcctcaaaaaatgatcagtttctaatagctacagaagtgggaatacttcataggatgcaggaagaaaatccatctaaagaatttatccctgtaaaaaaagacgcaatatgcaaatatatgaaaaaaataacaatcgaaaaagtatacaattcactccttaatgatgttcatgaggtaaaagttcctgaaaatattgcaaaaaaagccataataccgatagaaagaatgttggcaatttcttgaccggggcctatcataccccactctctatcactctaccaccaaccttcttgtttgctttctccctagtcatctaggttacatccttacatcatttaccatatccatctacgatatattactaaggttagaggaatcaactgctgccatacaaaaactacaaacctaaacatgatacgttccaatatctaattacaacaagaacacctattaatactgctactgatattactaacgcgactttagtacaattaattttatcctatagcttgataagattgtaaaaaattaattgaactgatattcgatgtgtaaatgtagtattatccgggaatttcaagactgaaatctattgcttgaactgaatgagttaacgatccaatagagataacatctggtttagcaatggcatagtcataaatattatccaaatttatgcccccagatacttcgataatgattttatcgcgtaagcctagtttcctaactctgtctaatgactctttgacatcttctggtttaaaattgtccagcattactatgtcggcccctgattttattgcttccagtataccactaaaatcatttacctcgcattctatttttcttttatttccatacacagacttggccttctcaatagcttttttcacagaaccaacaactgcgatatgattgtcctttattagtatcagttgatcaagtcttaccctgtgggatatgccgcccccgatgactacggcctttttatcaaaataccttagtcccggaacagtttttcttgttgaagaaatcttcacagtttttgacaattctcctaatttttcgataaattggttagtccgggtagatattccactcatacgcatcaaaagattaagtgctgttctttctccctttagaatcgatcttgatgatccgtctactgccagcacatctgtaccttttgctatttttactccatcatcaaccagaagtgttgcttcgcatccacaaatatcaaaaataatttttgcctctgaaagtccgctaactattatgttttttccggcgttcttacaaactattgctccattagaaatagtctcctctggaatcagtaaattgcttgtaatgtctccagtgccaatatcctcatttaagaagccgaccagtgtggctcttttttctacctctgattggaatggaacaccatgttcttcctgctcccgctcctgctcctctcgcccttgtcctaaatctcttaagtttgaattataaaaattgttataatttttcaattcaaaaatgttatgtaacttttaaagcatatttgtgaggaacagatatttccaatgtagctgcgacctttgatttttctggatgaagtatcaacatgattccaaaccagtctttggataattcagtagacttacaaactggacacattttcccagtggttaaagccttgcattttttacaggcgtattctcttaccaacaatatcactactcggtataatttttatctcttgtctttttttgcatctctggaatgtgcgctctctgcgccttttttgtctgcattgttatccttactgttagaattttccccacttgctcccccttgggcacgtcgtatctccttttctacccattctaatgcacctagaaatggttgtctacatgtgattcctatcttgcccattgatgcactctttcctaagctaattgctgtgattcttgcacgtattttggagcttattcttaaagttttttcagattgatttgataatatcaaaccttgtttaacatcactttttaagtaatcatcggtgatctgagataagtgtaagagagcgtcagttggacctattctaacaaatgcaccaaaatctgtaatttctactacctcaccctctacgacttcgtgaagtttaggataaaacgttaaagctgtaaaatttactttgtgatatgtagctccatccccagcaataaccttgcctacagcgttggtttctgcatctatgatcaaaataacataacccaaatctgaactgaccatactttcatatttttcttttaggataccaattgcagttaactttagagaattagttagcttactagggggaattcttactacatcggacatatgtgctatagcaaacataataaagataaaagatatccagaactatcagtttatgaactttatgtttaattttgattaattatgtggaaagatccatccttaattactgtttagactattttcattcttgcttttgagaatgaatgatttaaatagaataataactcgatttttatatcgttatggttactgtagataaagtcattagtgccttaaagactgtcaaagatcctgaattacacaaagatatagtttctatgggtatgataaaagatattaccattaatgaagataaacttgcttttacattggaattaactacccctgcctgtccatttaatagcgaaattgagcaggatgtgagaaatactatttcaaatttgggaatcaaagatttggatcttaaagttacggctagagtgatggagggcaggacaataactatggatcagatcctgcctggagtaaaaaatatactggctgttgcaagtgggaagggtggtgttggaaaaaccactgtttcggtgaatttggccgtagctcttgcaaaaaccggtgctaaagttggcatattagatgctgacgtttatgggcccagtgtacctttgatgttgggactaaaagaggtcccagaggttttcgaaggtaagattcaacctcctattactgaaaatgttaaggtaatgtctatgggattcttttatgagcagtcccagcaagctggaatataccgtggtcctattattgcaggtatagtaaaacagttcataacggacgtaaactggggcgaacttgattatcttattattgatttaccacctggtactggtgatgctcccctaaccatggcacaaacaataccaattaccgggatccttattgtgacaacccctcaagaagttgctatgaatgtagccgttaaatcaatcggtatgttcaacaaattaaacatacctataataggtgtgatagaaaatatgagctatctaaaatgtcctaattgtgatgaaaaaatacatatttttggagaaggtggaggaattaagattagtgaacagttcaaaattcctttcattggtgagatacctttgacaacccaaattatgaaaggaagcgatagcggagtatctgtcctcatttctgaacctacatctgaatatgctcaggcttttaataaaatctccaaaatcaccgcaggaagaataagcgttattgcatcagaactgatggaccaagaacaagaacaacaaaaagaacaacaaaaagaacaacaaaaagaacaacaaaaatcatagagttctggataatatttaataattctttaaaccaaaccttgagagaaaagaaacaaaaaagaaacctttctaaaatttttagaggagagacaagaatttgaaaatcgatcaatcccaattgaatcttttgaaggagccttttggggtattaatcaaggacgataatatcaataaagagtccttaaacggagaaattggaagagcaaacaagataataacagtaggagatactactactgaaaaactggtgcgtttaggctatattcctgacatctcggttgtagatggaaaagaaaaaaggataaaaaaacccgagagatttgaatataccactgataaaattttatatttcgagaataaaccaggagagcttgatgagcgtataattacagaaatactgcaattaactaaaagcaaattagaaagcaaaatccaattcattattgaaggtgaggaagacttggttgcgcttccgtttctcatgttttcgccagataattgggtcgtatgttatggacaaccatatcagggcttggtaatagtgcatgtaagcgaagattctagaagccgggccaagttaatatttaataaagtctttaacatttagagttcaacaatacagggtatgatgatacggtggctgtatgaatatacaataaaagagatgatttgattttaccatttactgaccctgaatttgttttttgtactttttatttaattttttaggtttgtacttttttcatcttcatttctatatcgattatgacctgcttcttcttgtcagcaatcacatccacaaccatctctgctattatcaaaagtgcctatgccatatttcttcatacatacattgcatacactctcagattcattaattgtagcaatattacaaaacgaacatactttcgtcatatgtgtaactctatgaagatcaaaaataaatccttatctaaaattaacattttcctcttttatcaatgtctagagtttaaatatgaaccaggtagatacttaggcgcggttcaggtaaagtttgtatatcgttcctgtctcgtcgctgatatagttccagttttcaggattgatcgctacaacagaaaaatattcttgttcctcttttgatagtacatcataaattaactggcccactactatgtggttaaccttagcaaaagcagtcattttggtagcaatactaatggtgtatcctagtatatcgtaagacggtttcttatcggatatcaattcgctagttttttgaatggttttataatcatacagtgttaggtcgtttacattatctacatgtggataatactttacgattacattttcgccgtaatcaataccaattctaaccccgatctccggataatcatattgactaaataccggattgaatccatgattgataactttaatcatggtacgggcgcaatttattgcattaatacaaagggtatacaaatggtcggaactaacattaaaaaaaccaattattccatcaccaatatatttcaaaacatatcctccatagagacggatgatcttggtcatctcctgactaaaagtttgaattattttagacaccctttctatcgggagattcattgacaatttcgtagaccctactatatcgatatttagaattatcagtttaattttttcattatagtaactgctgagaacctgttgagtttcttcaaacggggctgtaaaaatgggatctgaacgtaaagctttccacatacttgattgggaagcggtaataattttttggatatctatcagagcatctacgtaaaagacagaggcattatctaccatattgttgcctatcaatctgttattttcatgatcttttttttcatttagattctttatgacctcatcaacttcctctacatcaatatctagctgcaatgcgattatctctggagaaattccggaatcaaagagatttacaatcgtttgatgttgctcatatttggcaattttctttattgtttgacccttttctaagttgttatcatctgattgagaaattctcttttcaccttcaataatgataaatcatggttaaaagtctatagcagattatcatttataatttttgccaatatcgtattggttaatttggataatgattctagatttattaataaattgcataaaaaaccactttctaattgactttagtcaatgtttttgaccttcctgtcggacttttttgctgtcgggtaaatgaaatcttctctactgctatcaccataaccatctacatcattatcaccacccaatcttttgagggcggttaaaatttccttctctattttatctatttctgggtttgaatttttttcaatggggcgatcagtatcagcgaagctgttggtgtttgtagattccttactgttctgcacaaagtctgttgctgtgtccttagaagcatcatcactacgtttgttgtttgtcgatatttctgaaaatgaatgatgattagaagtaggggatgatgatgtggttgtaatcgcgggttctgattttaatggagaaaaggatgaagtttcttttgctggtataggtcgagtttctgagtcttttggtacagttgcagtttgtcttgattctgctattctagagctcattgaattttgaccatatagaatagtatctttaaatagactttgagaacctgattcctcagtactgggaacactagttcggtaataagtcgagggatcgagagaagatttggtacagttgaatttatcctgattagcggagattactaaaacttggttgtataaataggataattttgattcaactctatcaagtttttcatctattttctcttgtaaatcaatatttttataatgaattttttgtattttaaaataaatagtcaatattattaatgaaatggcaattgtttgagcaaaaattgcgactatcaataaatcggaggtaatttcaaaaccaaacatttcaataagaaacggtaaattttttctcgcttttaagtctaattatttaattgattgttgggatggtgtgggtgagtcggccaacgacggttttcctctcattcacagcgatgggtatctaaaaagaaggtaggaagagatgaaggggattggaagaaggcaaaaaaaagaaagacctatgcattccatcgaattgaatctgtatttcgaataagatatgaaattcgtttgaggacactttttgtatcatctccacatccatactgggaataaaaattgtttcttatatagcaggatttggataatttctgatcgactaattgcacattcttatattttatcaggcctaggttaatttttatcaaatctgtgattacctgtaccaagccttttcttgaagcatatgctttgtctctctttacataccaaaacatcctagttgggtctttggaataattactaaatactaattcctttagttctgtggacctttcaatatcaaagtgccccaggatttctatctcttttttggacaggttgtaaatgaaattagcaaatttggagcaagaagaacaataattatcatatattaaaaccggaaaatgaaactttacgtcctttttttccatacctgttattatgcatcctaacttttatcttattaacaagaattttgagtgtctaaagcacttattttatcatgagcgtgtaacatgcggatatataccattgttctattggatcttaataaggctaaaatatcttgtatgtttgatgacttgaaaattactttgattcaaaatttgatcaatatgcccaatcaggatctgcaaaatcgattttggttcacaaaaacgaggccgtaaggatgttgctatcccgttttgatacattgtactaaaaaagagtgatccatattaatcgataaggtggacatctagatattagaagaaaatatttaaattgaaaaaaacatttcagggtaatgtgtggaagattttaattccaaaaaaaatcgcatatggagaaaatgccgcaaaggaatttgattaccctgaaaatgcattaataataacaaccacagagagcaaaatttatgaaaaatggattgactatatgggaataaaaaattatcacatttatgataaagtcactcctgatccagctattgaatccattgaaaccataaaaaatgaatttgatggaaaaaatgtgtcttgttatatcgggttgggtggaggtagctcacttgatgtgtgtaaatacttgagcaagatgactggtgtcccaaaaattctaatacctactacatttggaacaggtgccgagatgactacttatgctgtgattagttttgatcataagaagaaattactacaggatgaggcattcttggctgatgctgctgttattgatccatactttttgcctgggactccatttaatatcatgcgtaattctgcatgtgatgctgcagcacaagcctccgagggatacgacagcaagttggcaaatcctctaacaaaattgttttgcagagaggcatttgatattctggaagacgctataatcaacgataaacctgatttattgccttatggggcaatgctttcaggaataggctttggcaactcatcaactaccttaggacatgccttatcatatgttttttctaacgagggcgttccacacggatattctttatcttcatgcacaactattgcccacaaatttaacaattctgtctattatgatagattcaagaaaatatgccaaaaactaaaatttgagcccttaaaacttaaccaacctctggatgccgctgcagatgttattatgcctgatagggggcatttagataacaatccgagacaagttacaaaacaggacattataaagtgtcttgacgagattgtaaacagtaatccccttgcataaaaaccctatttttttattttttgctaggaaaaactataaattcatattaattatttatcaagttatcttatgactaccattagtaagagtatggatattgctgctccattgagcgaagttttcacttattttgcaagacctgaacacatggcagatcaatttccagaaaatatgggtctaaacgtaattccattagaagtcaaaaacggatttggagtaggtacaatttttaggattagcggtgattttgatggcaaaaaattagaatgggattgtgaaaccattgattacattccacataaaaaaatagtcgcaaaaatgattgaaggaccatttaaacattggcagattactgttgattttgatgaattagaagagaaaaaaacaaagacagcattaacagtagagtacgatatgcctatgggacctcttggaggcttaattgataaagttaagctaaagaaaatagctgaaagaggaatggaaaatgggttgtatagagttaaagcgttgttggaaggtaccggctcaattccagtctatataactctagaagcttatagaaaggtcttaaaagagaaagagaggttaaaatgctcagtttctgaggcaattgttgagatcatcaatcagaatcagcaacaagctacaaccgcgaaaccaatccaataattttttgaaaccattatattaataaaaccgataatctccttagtttagtttaaatagtgttcagctaatttcatttaaacgtagggttcgtagctcagccaggtagagcgtctggctcttaaccagatcgaaagaggttaaaatgtcgtgggtccgaatcccaccgaacccgcttagaaatacacactaatatacttaatttggactacaactattataagttgtggctaaaagaggcaactccatttcaaaattttgcttatgcgttaaaatctaaagatgtaaaaagacaatatccagctatgctcatgaggtttttaagttttacaaatgcctcgggggagactatcgaagaaaaatgtatttcattgtgtgattactcgggtaagatcgaaaatcgtaaagctctagaatcagagctaatgcgctacatacattttcaacaaagtagagttgatagtaaggagattagtcctggtactttgaggaattacataaaagccataaaacatttcttcactatgaatgacatccttgtgaattgggataagataaaaaaaggaatgccttctgttaaccaaacctcaaatgataggattcccgagatttcagaaataaaatcacttttaaattacaatgatattcggattcgaccaattattcttacaatgctatcatctggaattcgtgttggtgcttggaattggttaagatggaaaaatgtaattccaatagaaaaagatggttcaatagttgcagcaaaattgatagtgtattatcaagaacccgaacaatatagcacttacataagtccagaagcgtactcttctttaaaatcttatatagacttcagagaattacatggagaaaagattaccggagaaagctggctaatacgtgatcaatggcaaaagatgagcaaaactcatggacacaggataggccaagcaaccctgccaaagaaacttgatgctgaaggtattcgaagattaatttatgacgcatggaagatccaaggagtaatatctgttcatactttagattctgaaggaaaatcgcgtttcaaatcatcacatggctttagaaaattctttcagactcaatgtgaaatgatcataaagtctgaagatgtagaaattttaatgggacatggcttttcaaggaggggactaaaggcaaattattaccgaccaaaagaggagtatttattacaacaatatcttaaagtagttgatcttgtaactgttaatgaggaacaaaagctatccattcaggtaaaggaattgttggataaagatagatctaatgaatttataattaaagaaaaactccaggagaaagaacaacaaatagaaaaattaaatgaaaaatatgaagaaagtattaaatcacttaaggaagaaatggaactgaaatttcgacaaatattatctaaaatcgataccagcaagatttagaattggttctataatgcctgtaatacacctgcatcttatttttttaatgtcctaaagaaatcttctggacaaatatgcgtgagaagtgaatgcatgactacatattgtttcgctggaatagattcaagagattgttttactcgcatatatagttcatcaattttcttatctgtatttttggtgatatccaaagtctttttctcttcattggttattttagatcgtttttcacgatattgaaggtctttaaggttatatcgtcgttttccatacatttgaatataccattctttctcttctccaaataatccttcaatggcccattttctatgaatacgatcaattatttgatcaaaaaggttccaacattccttaacaaattgttcgagattcttattaatgataaaaagtttctccttattcacgtagtatgaggatataatttcctctccaactagaaatttaaagcataaaattagtttttcctcagataattgcttttccatatctttgttcataattgcagtagcttctttgatcgtgatgccagtttttctcgatgtagagactaatgttctaaaattatttttattataaataacaattgatcctaatcctgatcttacttttttgatgttgattagaccctcttccgttagacttaaaatgattaaacaataatccctaaaaatttcatattcatcgatggaaaatttgttcttataacaaaatctgccaatagatgttaatgatgtgaatttgttctcgtaacccgtttttattaatacaccatttacaattttttcctttgttttgagtaatgaaatggaattccacctggataattcattaagggtcctactgaacatggtttttgaaacttttggaggagagtttttatctttatctgggtgtatcttttcgtctactttataatataattgactatattgaatggattttcctacatcgccttgttcatttttatacaaaatatctagaattggcaattttaggtcatatttaaagttcaagaataccggtatttttcatatttttcatatttgaagttatattttattttgtcaaaatggcaaaattaaaaagaaagtggacaaccggaatttccttggataaggaaatttggaataaaatcgacgagagtaggggagatgttagcagaagcaagtatgttttgagaatcatagaaaaaagtctgccttctaaagtttccaattttagtcagtcagaaggtagaagcataagtagatcaaaagccatgaataaccatgactctgataacaaagatactgactcactagcatttaaagataaagcctgtatagcacattgcaacaaagaggggatcgagctcctaaatataatatacataaacagagttggaaggttttgtcgtgttcatgcggaagagctattagcattgggtcttgtcacaccattagaaaattcaaccgaaaatgaggtaaaaagtaatggaatttaagataccagaccatctgcagtattctatcaaatcgataagtttggaggctaacaacaatcttctcacgactaaacttggtaaaatatacgataacaaagaaatcatctgctcatttgatgttaaagatacactggcattactatacaaagagaatcttttgaactctttagagagatatggagaatcaatctcatacaatgacaagatattagaaattgaccctaacaataccaatgcggtaatcgaaaaaggtactgccttacaggagcagtctgcttctaatctttctcaaaaacaggattctgaaggtcaaaataagagttcaaacgctcaaccccctatttccataaaatctaattctacattctctgaggggaactctttctatattctaggtgaaatcaaaaataatcaaaataaaacattaaatcttgttaaagcgtatgtagaactttataatataactaaaaataaaataggatccatttcaactttcacaaccccaagtactattcaacctttcgaatcagccgcattcaaattatctatcggccctacagatgtagataatgtaagtagtattgatagttggaaactctatggtggttatcgttaaaatattgtaaaattttatgggaacttgatacccataactctatcgttctgaggtggtaaattatttaatttgaatagccacgtacatcttcgcctatctctgtttttcgagtgatatattcctctatggaccatgtataaaagctccccgtaaaatgtgatcatggctttgtcttggtaactatagaagactgttttatcgctatatcgttactaggttaagtgtttacattttatttcattttgttcggtttatcatcatcgattaacatcgcatcaatttttgccctcaagatcttgagattttctttatcaattgcaaagccaattgtatctactttttcatcgttcatgtagacatgcttagccacagaaaacatattctcgtatcctgctttacctttatgctttttttctaaatctgtaactgttacttctactttatctaccatatttcagagatgagaatctcgaaacttaaatatataagatttcttagttggttgaaatacctgattgcaattctcttatcacctaagttagaatataggtcatatttgtttcacatacgccgaagccatcccgagatgattctacggataaatattttggatatcatttttcattcaaatcacatttttcgacttcttttcgctcagtgagactgtatattataagattagtaaaaccaaaacacattgaaaaattgtaagtgctgttaaaaatgattggaaaaacttatctaattattatcaccgtcatctccgccactgtcactatctccgccactgtcactatctccgccactgtcactatctccgccactgtcactatctccgccactgtcactatctccgccactgtcactatctccgccactgtcactatctccgccactgtcactatctccgccactgttgccttcatcactactattctcgttaccattattgtcttggtctgaattgccttcatcgttattgttatcgttattgtcatcgttgtcacttactctttcacaatctccgcttggactacgatgagatccatcaggacatcgttccattcccgaagtgtccgtcactctttcacaatctccgcttggactacgatgagatccatcaggacatcgcgaattattatcactagatacaacatttaggctatcagcattattgttattgttgctgctttcacatccaatcccatcaccgtcaccatcaaagttatttggatcgctgcctccaacttggaagttacttgcagcaacatcgctacaattcaagtcacccacagtagcactattgtaattgttactaccattaatatcaacgtcatcaagttccactgcctgttctgctgctattcttatagtgtgttgttcgaaatcgtcatctgaccattggatactaaattcatatctttcagtgtcatcttgaacagcgtcactagttatcataatgtcaaaccctgctctcccccctggtgggattgatgaaggttctgtgatacctgaagccgtccctagaaagacattatcctcgtcatagaaagatgcagatacctgtacaaattccgctgtctcgcttccgttatttaataattcaccaactaggtgatccgcaaatctgtcttcgtcataattttgactgagtaatactatgctattgtccgaatcatctccgccattatctggggggctaaattgagagacagaatttccaccaatatctcttggaatagtaaatgcttccggttgagatccttgaggtggttgttgtggctgacttggttgagtcaaggtcgtattagaaggattttgaatactagtcgcaggtgtagccaacacacttccagaccatgggaagatcataagaattacggataaaatgacaagaatagtggtcatcttcgaattaaatgttttgtcaataaacaatggatttattgtgccatgacctcaatatttggattactaacattgattgataataataaaagttagaatttactattacgataaatctaaggtaatagtaataagattatatatctatccatataaacacaatcaattgcaatatcattttttaattcttttagcattaatttttagtggtcctattttagttattttggatgataatcaagaatctttcggaaggtgtcccgatggatttcataagagtcccagtggtgattgcgaaagagtgacagaaaataaagggaaacccaggtgtcccgatggatttcataggagtcctgatggtgattgcgaagcagtaaatggcagtagccggagcagtagtaatgacgatgatgatgaaggcaaagatcgcgacagtgataatgatgagaagagtacaagtgattttgatattaaattatcagatttaggtaattccaatgaggaaggcgataatgaaaacgacatcaaaagtgataagaatgatgaatgtcctgctggattttctaaagatcttgatggtggttgcaaatctatcttaggttatgatacggaaaacgaaaatgcaattacaagtacggaaagaaacagtattccaaatactcctgacctaaaaaatgaggggattgtgtttaaagacgccaataaaaagaacaccttctacgatcaatcgggcaaaatattgtacatgatcattgattcagaggagattgctgcaattaatgataaagaccttgttaaaaaactaacagtcaaagatattaaagatccagtttatgatatttctgaaaataatatatattttctgagcactaatgacaaaattaatgttttcgacggtaatgaaatccaacctatagataccggagttgagatagatgatttagaatacaatccctcaaacgggtatacatatgcaaccagtagcgaatatggtaaaatatttgtcttagataatgagcaaataataaagagcctagacataggccttggtcaagtggattatcttgcctataacccttctaatggatatatgtatggtgtggatagttataaaggaaatatcatcattttagatccgtcagggataaagggaaatttgagtactggctatagggtggattatcttgcctataacccttctaatggatatatgtatggtgtaggcaatgaatacaaagagatcgaaaaagatcctgatccatatccattgagtaataatagtcaactttctggcggattacaaccttttgcagaaattcaacaattcaaccaggatgtaggaaatggcccaatctgttgtgatataactgcgagcaaatctcctggatctaccggtagtttaggtttcggcgagtctactaatggaaaaatcacaataataaacggaacccagaagatacatagtctagtccttaatagccccatagagaacattgaacttaacccagtaaatcatttactctatgtattatcaaataatccaggaaaagcatcgctaatcaatgatactgaaataatcgatacgatggaaatagggggcaatcctaaaaaaatattctttaatccagccaatgggcttacctatgttaccaaagaaaataattatgattattctatcgacgtatttgaaggaaaactattaaaaaataatattcctatcaaatatctctatgatgaaattgtagtcaatccgtctaatgggctggtatacatgctagataatgatatagtatatttaattgaaaatggttcaatttctaataaaataatattaaatgcaggagaagagcaagaagtggaagaaaatttattttaatttataaaatgatgctaactagtctataacgataatgtacggcagcgaaaatgctgtagccagaggtgaaccatttatgaaaaaatgtttgaaaaaatggataattatctatctagattctacatcgtaccgcaaaattatactgttaacaatctaaaccagactcggcctgtaccaacgatctttttttcttattcagaataactattttgcaaattcagactcaatctgtctattaacaaaccaataaggccgtggttttagtttgtattatgaatgccgttacgataaattctgattgatgtgtgaacccttaaccacaaggatttaaactcacttggttccatattaacatatcaatggaatcaaaccgatggaccaaatgtattactgaatgatgctacttctgtcaatccaacctttgccgcaccgacaaccacaacgcaaattgacctcacttttcaattgactgtcaccaatgaagaaggtacgactagcaaacctgtcatgtgactgtaacagttggtccagtttcaacgatccctcctcctactgaagatcctcaaaccatctatgacattattaaggagaacattaaaaatctattggacataactaactccattgggttttccgatcaaatagtcgaaatcttaacagacagcaatcgagataaagatggattggtctttgaattcctgagcgattagcgatcaaccagatgaatcgaataaaagatgcaataggcagttaattaatttccgatgcaatattgtcaaagtcatttacataagtctaaagcaaaacccataagcacaaaccgatagtgaggacggagttaacaaaaaatgtaggaaaacattcgtgtaagcaatccgagctgccgaattagtgtgttctcttctaaaagtaacataatgtcttgtagaaaatcacctattacatccatatctagggtataatgcagttttgatattctgtgtatattttcttagaatagtgttaccaatagtcaagataatttgtaaagcctcgcatatatatgtcatagttaactcccgtgctttaataagatgtcataccagtttacagcgagttggacaggtattttctggtcctatctaataccatctttttattttcgaatagaggtgcattattcaccatttctttgaattgaagcgcgttaacagcggcttgtccaccgtatgaattactgaaataaacgaaggtgttatcagtcatatcattaattttttttattttttctgctaatgtctctagttccttctgagaatatgaatagttggacatatggtcataagtattccttccacaaagtcgaaaaaccgccaaggacttgcatgttatatgatcttcattatttaagaaatttaggttcgcctgactgggtgcatcacttaatacatatgacacatcgtaatgctgtaatatatttaatactccttttgtatcccatgacttgtcattaaattctattgcataatcaaaagatttggtaactgagttattttttatcatatataagaactcttgcaactgcatatgttctttgatagtaaaatatggtggtaatcgaatgattatagcacctaacttattggcattttttagaggtgaaattttaccaagaaaaagtgttaggtcatctatcatagtcttgttgtaaatgtttaatcttttattatcagttatgatttgaggaactttgacagacattttaaaattttcaggagatatctctgttaaccaggtaaacagatccttactcatctttttataatgtttcttgtagaaagtttggatcatttctacagtatcaaaaaattgtgagtaatatgcaaaagttttggtctttttgctaggataaaaggcgtttacccacccaccattttgagatgtatcaagataattccatccagaacatcctataaataatttagaactcatgtcctataatttattgtatcattagtgataaataagaaaatcgattagctataaacattggtaatgatcttctacccttcaatacctctatttattctgattcgtgagatcatagaatatgagatggtatttttacagatgttaatctttctttaaacaaaaataatcaaaattcccaaatacaggacaaaataaaatgtattaagatgaaagaaaggaataactgagattaattttaggaccgtatctgggaagaacaaaaagttatgaggaccagcttaattttacaaagatgactcgataaatgtgaatgtataagacctttggatatggactttaattcaaaacaaagaataaaagcatcattaaaaaatacaaaaggttttttgagtttagataatttaggactgaaatatccatcactgcatagagtcatcactatgtcgataagtacttaggatgaatttattaatgaaaggtggacttcatcagaactgttaggagtattctaatagctaaaaattaaaaaaaaggattagttagatcgaaccaaacgacaattaaattatttaccaacctagaaatccttaccaacttgactgctccaaatgatggcctatgctaaatagtattaacgctagcgtctaaagccgaagtagatgtacttcttttttcagttcaggcaccagtcaaaaaaaaaattaaatggtaaacagtaaagctaatgaaattattatttctgataatgcaatagaaggcttggtaagttcgttatccaaagaaatttttcaatccttatatccttagaatatctaatcaaatctgtatttgaggcatgatattgttcataattctagatatctaaagtttaatgtaatttttttaattattacattattaacaatattcatgttcattgatacatttctcattaagttttatgatatagtaaaaaagaacttcatcactccggatggaaaaaagatattgtttagtataattacaagtgcatgtctaattcttgaattagtaatttttcagtatatgaaaaaattaatcgaaaaaacaaaagtaaatattaaactaaatctgggttcaattgacaagattgtttacatcacccaattttccgttatgatctttatatttatattaataatccagattttttatgttaattattatctatcttatatccttatgattattatcactattgtttttgggactactgcgttccttatagggaagatcactagtatatttgtttcatggtatcgtataagaaataatcgtatttttttcatttatgctctgtctttatcattaattatttttaatctagtgatgaccgcaattgttttaaacttaatcataatggaaaaaccagaacaaattcgacaattcgttgggggtagtatggacttaaatgcagggaagcattcgatattactacttatcttcaagatttcaacaattttatcatttggaagtatctggttgaccacagccttgttaatgcatgtttcaaaagatcagttgtctaaaggatttagaaattggggtttgttgagtatacctgtaatctatttcttaataagctattttgctcaagatctcttttctaagatgttttcatcttttcttcaaaccgatcccgtaaatttttcgataatactgactacgtttattgtattgagtaaaccaataggcggattgatatttggattgttattttggagaatatcgaaattcatcacgtttgataaaacattaagagattgtatgatcatttcaggatttggatttcttttattattcggatctaaccaatctacttcacttgctttaggaccatatcctcctttcgggatagcatccatcacaatattgattgtttcggcttatttaatagtaatcggcatatatgtgtcagcaactttcttatcttcaaacgctaatcttcgtagaaccatctataaaaaaacaaatgagttaaaattattagatctcattgggactgttgaattcgaaaaggaaatcgaaaaaacggtgaataatgtcattaaacaacagaaggtattgatggattccgaaaatgtggaccttgaaaacgatcctaacgaattaaaaaattatatagaaaaggttgtaaatgagttggggaaaaattgacatataagggtgacaagttgtttaaaagtatagtttctaaagaatggaaattcagtaatttgatattttccactaaactggaatatagtatgactcttacaaacaatctatcaatatggactcatagaatttaatctatatcataattcttttgtagtagcagtttatacagattatagaatgattcaaatagtctattttgttgcaattttaatgttaaatactgtattgttaattccttcaacgatgttaatatctgttgcttcctctgataattctacaattggtatttttccacctgacagtaatccgtatggattatcatatgagagacataccgaaaacttttggaaatggattttatctttgcccatagacaaaaatccatgggaagatgctactggctccaattgcgataacggacaatctgagacaaattcgtctatattttatctgagtggcaatgggggaggaaaatcggatagaacatgtattattgaatctggaaaaggtttgttcattcccatttcacaagtagaggtatctgataaagaggttccaaatagctctatagagaatctacataatatagcaaagaatgatcaagatagcgttactagtctatatctaaagataaataacaaagaatataatcgtgaagatctggtcccatatagagtacataccgcgacttttgacgcatattttcctgaaaatgcaatttttggagctagcgaaggaaattccaaagctgtggcggacggttattatttaataactaaacctcttgaaaaaggtaactatactatacaatataagtcgagcctaatatgttctaagatagattgtttagaacctaattttgcccaggatataaaatataccataatcgcgaaataaaaataacagccatttgagcaccttgacgagatcatcgttgatgtcagaacatccatgtgtatatgaattgggggtgttccaattgtctggtatttgaagttgtatacttagtttcgtgcaaacccgacacatttaatacttattttataaatattcttgatcaaattactcacagatctgtgactctttccaccgaaccctcataccataaggaacctaatcccaccgaaataaaaccacgtgtaattgctattttaataaagatttattagcagtttggaaataatatcaagattttctaaattgccggtcactgatggttctttgcttcatattacaagtgaattaatcatcttttgtattgttagtagataatgtgaatatccttctatgttactaacatacgtaattatatatgctttatttccttttattaaaaacactttcatttccttttcttgtccttccccaatggaatacactattcacaaatacagtccggataaaaacgcatcgaattggcggaccgaacggaaaataattcctttagctctcattgagcattctgaatgtctcgagtgtggttcgaaaaatattaccacagaaaatattgaggatattaatacgaatgaggggattgacattttagtctcctttagatgtaaaaattgcgataatactaaatttcaaattagagaatttcaaagtttatggaataaaactgaatcgatcaaattaagtccagacaaaatagaaattgtaaaggataatctagacgaaataaatcaatcttttattgattaaatatcttagcatgaaatcaataatataatgtatgataatttagattatcttttattcagattcattaaggttctccatccttttttatttgatatttcggatttatacctcagtcgactaccttaacatcttaatatactataatcagataaaagatcctctgtcggactaattatatttacgaaaactgattcaagatatagcaaaaatgtcttttacaaaattgtaaaattcttaaaattaaatccaaaatttgcaccaaatttgtattacagacctctcgatttacattacctaaattgagaaaataaaaaggtattgttaattaatgtattaactattattgtggatcttgattatcatcattaccgcaattgggtttctgtggtacacatgacgggttattggcttgtcctggtaaacagagatcctgctttggagtaatcaatatactgtctcctccacttataacgtcgcagggctttgcttctgcaactaaagttagggaattgacgtgagcagtcatcatgaccattagtattattgaagatagcagcacaagttttttcttatcattgtaagtcattaccattagtgaattgatccaagtatatatacataatgtgatcaatatttactattaataattatccattcctaatggtatcaatataatttctattaccatattgccgatgataaaatattgaaagcaataaataagaaaatctaaaatgtgtactgaattttaatctctcgatctctgcttaaaactaacatgacttacttgcttttctcgaagatcattctcggcaattactatcatcatggtctttgatggacatataagttaaaatccagacttctttaacaataagaatctgttaccatacttaaactcgccatatattcatggtaaatctgattaggtgtccatttttatcagcataataaaataaagataacaagttatagcattatcaactacgttaattttttatagggtactaaaaagtattaatagatacagatagttttttattacattccctttgaaaggtaaaaactttactagaactagagcataatgtaattatacaatttaagttttaaatttcaaccttcagtctcattacaggtttcttcatttaaattcctaattgtatctatttaattatgaggtcgaaggtatcctgatcggatcttattggatttgaactacaattgttgattttatttagttgtacaagtaaaccatggatctggattatcttcattttcttttgtatactctttacacaattgtttcgatccttgttgtgcttgggcagcctctttgtttgttgtttcagaactttgactagagcattcgccatcagtacatgtggtatctgttatagttggatcttgaccttgaacagtacatctttctgatgtaatgtcttcatctactatatcaaaactggtgcatcgttcatttgatgatgcttcaatagattgtataattactggatttaaagcaaatgaggtcattggccctacagatatgatcagagcaaatatccaaaatgagaggtatttcataaattctctttctcactatgacatataaaaagatattgttaatttaatcaattataatacaaaaatgaaatcaaatatttgacaagacccatatgaggattgagatatacgaaatggagaatggattgaaaaactgcttcaaacacctttgagtgatcatagaaagtactgtatttttcacatactagttccctatcttttaaacataagaaaaatatctgttgaagaatgtacaaagttacttgatctttgggtttcaagatgtaataaaataaggccagtggattttaatccttcaatagagattaagaatcgaattaaatatgtaaaagacttcaaaccaatgagtttgtcaaagttacaaactgttaatttagagttatatcgattgataaattagtaaatcggcttaattaataaaaattttagctatttggtattcaaaaggatttcattataaaaatagatcaaaaggttatttattctacaaaaaaattcatttatgtcaaggaaaacgccgtcgccaagttgccacaaattgtttgagtcgtttgtcttcgctaggagacagtttgcttgattctgtcggaaaggttagaactaatccctccgaccatagattctttttagtgatgactgaggtctctttaggtgagatctcatcttcataatcgtcgcctggattggtcccaaccatactcagagcacctccgacagcataaccaccgggaaaaccggggcagaaagtttgacccatatatctatatgcaccactgccacggtaggcgaaagacaagtaatagcgggatactccaagtaagagttgaaggtccatcctctctatgtgcacctctgctgaaaagaaacctatccatcttctcttaccttaatgattaacagcagcagcctttctttgaccttcggatccttttccttcttgtacaggataccactttggctttggtcaacaaaactgtcgttgtctaagccattgataacaacagattgatagatacaaaaggtggtagatagcttttatattttatgatgttttggtgatgagttgtttagaatttttgtgctaattggtataatcggtataacataggctaaatagttcaatctaacatctttttatatgaaatatgataattatcgtaataatgattcaataaaatcaaaatctaattcagagtatatctatatcctagatgaaggaacgatatggtttgttgattattttttaggagttgcatttcctacccccattagttttgtagacgtagaaaatgggctttttggatcaggtttaccatacagagaattttcagactatttagatttccaaaactttttagaagaaataactggaggccaagaagtatctttagaatcatcagtaaatcccgggacattcaaggaaacaaatagtataataaaatgggcaacaaggtacactatacataaaggatctgctaatccataaaatacatcagactttcttagtattctatcatggaattctaatttctctatccgccaaagtcgtggttttatcatctagtcatctaaaaatcaaataattttgattagaccattgtataaactgatatactcgccatattggtttatttccattttacatttactcacaggaaaatcttcggttatattaaaattccatactaattactgtaagatatggaaaatgaaaatgaaaattataataatcatatatattgattattaatacttctattttcatgaatcatgagaatggaaaggtggatccagacatcacgaaaaaagataaaaagagttgcgtagaacagtctgaacgaattacaaataaaaaacaaccagacggatttacaagttaagaaataccagaacatcctgaaaaatcgaaattggtttcaggtccttgaatggaaaactatctcgttgctattttgttatcttaatagaatcattatttttgttcatctgttttatttatcacgttcattaggttttcgcaccgcaactgaaacaacacaattagtgtaaaaaaaacatacattagagacaaaatgatgaatcctaaataagttgattagtatatcatccttaaatcaaatccattattttatttccgtttcttaatgagattgactatagtaaaataaatcttgactattgtaaacataatatgaggtcaaatttggaccacatagaaaatctctggctaaaataccggcaccggtaagcgacagtaatatccacgttataaaaattattatttaatcgttactaatgtaagtaattatatgaatattaacacgataagatctaaaaactattaatatttctatcataaatcatatcgtgaacaaatcaatagaaattttgttaaaattttctatggggatcaaatacaaatgtttggtataaattcaaatcattattgctttgacgaatagatttgaaatgaatatgtattactgtcacaaagtctttgctacctatttaagaaactatggaatagaacctgaaattatagatttactttagggaagaattaacagttcagtttttgctaatcatggttatcgtccagacatacatgaaattattacaaaaaggataaggccggtgttggggtgatctgaagaaagaactaaaaaattgacattataatcagattataacatctaatcattatgcttgaaatggaatttatagatcagaaaacaagataaatgaaaactgacttgcaaagaagaggaaatacctcatagtaaatagatgttgatttcattacaagatgctctggaaatccgatatactctctccatagcgattgttgtaagagtcaactatagcttccttgagtgtggcaagatcaacatcctccaacttgcgtggtgaagagactcctggagtttgctcataattagagacgattacatctatgaataccggttggcgcagacgtttgtttcctactaactttaacaatgcctcggctattgctggatagggtgtaaagctaggattattgagccaattctttagatcctcttccggaacactgaaatcaattccaatatctttcaaggccagtattttgtcactcttcgtttctaattttttaaggatattttccaatcgacctgcgaattgcagtaattctggtagaccaatttttatcttaatgaggtctgaccagtgccttgtgaatttttccttactatccaagatagattcaaggctaccgttagtggtgacaaaaccgggcggttttggaagatctttggcagtaaaagtatacatcgaaaatggatcacagaggccaccaatatagtaacccccataaatatccgcaaccgcaaccggtactccttgtgtaggaatattttgaatctgttttggagttagtgtaccaactgaccgtacacctgattccatcttttgaaaagctttagcaatgaatgtgttgtaacgctgaacctcttggtgtattgcgttatcatcaaatccaacagtgtgaattactacgatccgagctgaaatggcatataccgcaacaggtagcgcccaccggtaatcccagacccgactgaaggaatgatgttcagccctgtcaggcatgtgtaccatccagccgctttggaaactcgtaggatctccagcccaggaaattgccttaacactatcaggacggagccaaaatccttcctccaaatccccggtaaaagtctgcactgcaataaatgagtccctttcggctattgcgagtctaggtgaccattcaggatcagatcgagcctcgccgctttgcaagaaagcatttgccgtttgaagggccgatgtagcgtgggcaaggagaaaggcgatattgtcttctctctgtgtaacccatgtcgccaaagttagatcattgatctcattcaatttagcatgtaccctgtttagtgagtctatcattggatcaggtgaacctggtttttcggtaatccagtcatttaactccttgactccagtaaaaaaggcgccatatagacccatgacatcgacaccaaagcttataacttcatgtccttccatagttgacatcaacggtcaaacatttatctatataataaagtgcttgttttatctataaaaattcatgttagaatcttggtatattaatattcttacaaacatttcaattgcaatagcaaaaattttaggaggaataagcctttttaatatttgtttttatcagggatcaagcataatttgtagaaataagaccattgatagaattaggaatattctctttattaatagcaaatccctcatcaagaactttactaactttgtaaattttcttaacaattgattaatttagataaatctatttaaaataaaattattcaaacaaaacatccgttttagataaagtttgaactatattcaataaaattttgaaatataatagatttattataatggtaaaataatacaatacaatgaattcaaaaccaatattcttaacaattggcataattgccatattgggaattgtgtctattacattttcctatggacaaaccgcattagcagaccaaggtggtaaaccgaacaacagcggccaagcacaagcaaacgccgatgagagattccaagcgaagatggaaaaggcattggataatgatcgcaataaagaagatggagcaaaccaagcgttagagaatatacgagatggcattggggttacctgtagccgttgctaaaatcttttttatataaaggcgattagggggcatgttatcttcttgttaaatattaaagaatataacattaatttataaagcagataatcaaacaacgtaatcactttcccgatccgtaagattagtactgtttcagaaggggataaaagaatatcatttaagcataaaatgcaataaaaacatggagtctgatctttacattttgatttaggccactcgattattttgaattgacctgcggagctaaagatgtaaagcaaggggaatttttctagcaccgtaaaaagggaaaagattcgagttacacttgaattaaaaatcgctaattaaggaggaacaaaaagacgatttgcagaggaacaataaaccatccataacatgaccaagactcttgtcaaaaatccattagatataacaaactccattgagtcttaacataagatagtagatcttaacagacaacggtagaaaaatgatagattggatgaccttcttggtaatatagagatcaaacaaacaaatcgaataaaagatgcaataggctgttaattgattttgattacaatcatatcaaagtcattaacttaatcctaaagggttttgctttaggacaaaacattggagaaccgaaataacaaaaatgacctagaaaaatcggtatgtaaacgccttaatacgctcattcgtattactctcaaaattaacgccagacctcgtagaaaattactcattaacctttgtacgtggtttaacgaaggtttcatattctgtctatattttcttagaatagtgttactattatatagtataacgtaaccagtacatataaacattactcaccctctcatcgtatttttttaaccccttttaagccatgtaataattgttttgtttgagtacatatctaaatcataaatgccaaaacaaacccctcttagggtttagtcctcacgaataattaagagagattataggagtctcaagcacggaaagtggaaataagtaaacatacagatgggtttgtttaaaaagtctggcttacaactaaatagacgactaaagccgtattatagaacttctaaaatcaaacaaaaaattcttaatatatagttactatttagagtaattaaagaagagctgcactgaatgagatcaaaaaagtttaaaagaaataccactacactaactacactaacctaagaaaactatatttagaatactggatctaaggggttagaagggattcctaattggtttgaatttggaattagaataatatatgtactatcgaaggaacgggagactagcaaataattaacgaaggcattataaatagaagagtatgggatttagaccgtataataatacatcacagtaacaaatttcgtgtgttaaaattgtcatcactctataagctcttcaactttttctacattacccaaaatgtggatttttttccatattcctatatacattccttccttatttggaatattagaaaatttatattttaatagtattgcaacccatgtatattccacttttttaaacgggtcaaatacatttgtatgtgtggcgcgttcttctgaattaggtaatagaattatatttggtccaggttttctggattcacttatcttcaggatatcatttaaggacataggtgaattacttgtttctattacctttaaatgaattgtagctggtgtccgcccgtaatttttaaactttgaccatatctcaccgttatcttttacatctatatcctctattggaccaatccacggtcgtagtgtcaactccttttcttcttggagtattcggacttgctcctttgagtttttatactgtaaaataagaacaacaattgcgattgcagttatgacactacttattgcactaatccattctgtaggagagcaacttaaccaagtattaattgatagcaaatcacaattctgtgaagatttatcagtcactagtacctcttcgaggaatccaatcataacttgataattcgaaaaaaagggttcaaatagtgagtaaaacatcattaacatatacatattattttattttcagtcagtaagtttactagtcatacatatgagtgtagttgattgcgcctctgcactgataaagtaaaacaatcacttgatgaaccgctgaatcctccaccagtctcaccgtcaggtccttcagccccaatacaagatgatggattacttaaacaaacatacgatccaaataaagaacgtgtgacgaacttgtcaaatagcaatgggaggagtttgaaataacaaccattttcttttgaatttacatggatggaaagtcaatgcgggaaataatcaatagaacctaccctcgaggaccgatattagcaagaagccctccgggcccgaacctaccttaacatagtaaattacaatagacaataccgaattaagacaaatcaatccctagtatgctgaaactaatcccgtagattggttatctaacccatgtgataattcacacgatttccaccgaacccgctacctatttatagtaacgaaattgataaattaaaattagaaaacttgataatcaatgaaaatgtttaatctactattatttctcctaccattgaaggatgatagatgcaatagtattgatattcaccagattcatcaaatgtcatgctaaaatattggttgggtattattgcacctgaatcaaaggcttctcctgcatctttgtcattatcttgtcctgaggttactgtatgggagatagtatcgccgttataccatgtaattgtttgacccttttctattgtgataggattaggagagtaggaactatcaccgtttattcctactatgactgccggaacagaattgtcattctgagaattggtttgatcattattatctaactgttccagttgcggttcatcattagttgtggtatttacagtaggggtgttgccgctggttgttatattaccggaagaaggtaagattctaaatattgaaccagtatagcttaacacatacaggtatccatctggacctgtttgtaggtctgttatgccgccaaaaccttgaccaaatactatgggttgattttctttggggtcgttaacttctttatctgcaagtagtgctgtgttttctatatatccattatcaaaggctaaatcatttcgtgcctcattaagaacaaatcgatataagagaccattatttatgtcacctacaaacatgttattctgatattctgttcctaacttatcggaattcaagaattctaatgctgtaacgcctattggtgtaacccaagagaatttaggctcagaatatgatccatttccaaaatataccaagtcatccggtgttgctccagtacccataaaatcattctttgaaaatccttgaatcaatgaccatcctccattaaagccaggatacactaaattgatttcatcgcccgccgtcggaccattctctgtatcccataagttacctgtcacgggatcaaaatccatgccaaaactatttcgaatgcccattgcataatacaaattaagaggagactcatcaccaaatattacatcgccatttacgatatcgccatcttgagtaactctgagtacaccaccaagtccatttggttctggaccgtcttcaatattctgtgcttgggtcctatgtcctcccacttctcctattatatagtagacgttattatctggaccaattcggattttgcctccgttgtgctcacctctgccattatctggtattgaagtaagatctagtaacagagtaggattttccagttgcccgtcaatgtattcataacgatataatctattacctgatgggtctacattgtcttcaaaatcgctaccatctgaatcgttgcctgattcagtataagaaaggaaaacatagatttttccgtctggttgttttgctaatgcaatacctagtagacctctttctatgtcagtagccacagatacatcgagtactggtttatcctggatatgaccatctataatccgcataacctttccagtttctttttcagtgaccagaatatcgttcggacccaagaacgccatactagtaggtttttctaatccatctgttattttttccacgacaaggttgttatcctttacagtgggtccatttggtgattgaggagctttagcatatgctccataggataaattaatcgtagaataactggaatctaacaataaaagtatgcaaatggtagacaaaataagggacagatcagttggtttcttcatcaattaccaattaacccattttttttatttagtctatctatgctcgtagagtgtgtattgacttttgaatcttgtacaatcccgcaaaggacagtgcaatagccacactttgcagaatttttgaaatcacgtctagttttccaacatagagttctacacccacaattggcacacccactgttcttgaagcggcatacgttatgatcaaggctattgaaacaactataactgctatgtatggcgattttttcataaaccttgtttttatcaaccataaaacaagacccaaatagattaaacctgaagtaatgaataacgtaatttcaacctgcttttcagtagtttcatcatgtataccaaagtttagtaattccacccaatcggtatactcaccatatgcaacaagaaaataaactatccctgtggctacaagaatgccacataaagcataaactatcaataaatttctattcatttttatcacaaattattttttgctagtaccaaacaaaaaaataagattaggctaaacctttctttgcttcttcagcatgagttaaagctccgtttgtatcattatcttttaaggctttcagtgaagcttcgatgtgtttttcagcaccgcttacatttggtttatcctctaaaccggattcagcttgcaataatgatttttttgcgccctcattgtcaccactctttatcattaagataccagaatcaatcaattttattagatcgctatttggaccaccagaggtacttgtttgatttgtagcatttgttgtgttggtttgtccataagatgtaacgctatttgaaattaaaagtagcggtacaatggccagaattgaaaacaaggcaactctcctataattttgtaatatgttagtcatttagggacatctgttttttttaggaataataaacttcttatcattcccagtgattgagaatggtcaagaaggttaattataagtcgactttggatcttcatagtatttgaacccctgccataatcgaactattttatcgtgattttctttattcttaacctttgcaaataattttattattcttaaacgtcatttgaatttcatcgatccaagaagtaaaaaatgattcatccgttccatcagttttgcgaactatttttgttttctttatcgtctttaactgttctaacttgtttacctttctatatgttgaagataaaggtagatctaggttagatgcaatttgttggatgctgtattctttttcctcaagcagtttcaaaatagtaagactagatttatctgtcaaaatggataaaacgtcttctggcggtagtgatgaagattggcgaacattcaactcttcaacacggctattattaccaatataaaaccacatatttctgctatttcttcaaccatatctttgattttttcatctgacaaacccaatgagtcgccaattattgtatcacctattgttatcaaggcaaaaccaactgcgagaaatatcattggaacatatctacttcttctataggctcgaatagcaaaatagactagtatgagccctaaaactatgtgaatcagtataatcagattcaatacttccatggctttactgttagatggaaatatgattatgatttaaatgttatactaaataatgaacgcagtttttctatatattaatattaagaaatatcactgtaactaatggtaataattaacgtgatgcttatcggtattatctcagaattgtatatcttttgatttagccattacgtaacgtatattacctctcatagaccccatctgatttctgtctaattttttggtactccttaaacctataatcgggccagtaaagaaaccaaataacatcttttgcatccagacaagcggttatacttatctggatgtaagcatcaaagcctaaatgatgcaaataatttaccttatcattagtcttaaggatttacaaaaaaagctccgtttacctctatatccctaaaattgatcacgactttcttatgttgatgctgtttttttaggaaaatggcttagttaatgctttctccaaccctcttaataatatattatatatctgtcgacagttctcattgactgagaatagtcaaaccttttatttggtatcaatctattgaaattattggtagtactgtgaagaaatcaaatcttattctattttatttattaggtggaatgatgggattattattactcctgtcgtcatttacaaacaatatatcagctcagcaaaattcaacaggcaatggtgatggtactcctattagtttacagcctgacataaatgctgaaaatatgttcaataccaaaacaatgaccttgggtaacaatgtaaaaaatcttgttatccttattcctaatgaaggtcatcatgctgccggtgaagacgatgaagcccgcttcttagaccagcattttgttcctgaaaatgcagtagttaatacaggaaccactgtactctggtttaatggcgacgttggtcatgagcgaacaattgacgttaaagatcaacaaggaaattcagtatttaatactgggaaaattatcgatagccaaccttcccagtcatttgcctttaatactccaggagagttcaactatgaagcggtaggtgacccaggtgtaaccatgactggtactattacggttggaaacatagaatctccagttgctccttctagttcgtctgctactactataaactcaaactcaagaatcattgacactgtgggagtactaatggtaccaacacaagatattgacagttatattcaacagataagagatgctggaatcacggtagataatacatatgactttaaagatttgagagggggtcaaaaaggcacaggagatacacaaacgcttattgtatggactactgcgaacaaagacttgaatgagacgctttcatcattaagtggactctcggcaagtttgccttatagttaaattcttatctattttgtgacctaatcgcaaatttttttacttgctaaatattcgaaaagtttttgcttcgtgctttcctataaaattcttgtattaatcgaatcaagtagtaactactcaaaaatgaaaaggatgttgcagttgtaataattataaaatatattgtaatttcttcaaaatcatttacagactcatatgaaatttcacactcgtcccaccgaaccagcgactaatatttggtaacgataatatataatagtaagaaataatttatggtaaggctgtgattttttgtttgattatggctctaactatggacctgcccagttaaagggtatatgcttactagaccttccttctcttttccacttaaaactcattgcatctacttcatcttttacagctgttccccatgtagcaacagcacctgggccaacttcactacccggtggattaattgtttgaactctcttccctgggggagtcattggacctcctagtgctactgcttgagcaagaacttttcctggtatctctgcactccacttgctcaaatcctcagaaatgtcaaatttaatgggagcaaaatcaattcccttaatttcccctattaacttggcaaattcagccataaatccgcctgctttaccactaaaaatcatctgaagtgcttctctttgtttttggtcagcacgctcatcaaaaaataaacccatagttacctttgtatttcctgcccaaatatttccttcaaaggctcctatagctaatgcattcaatccgtcgagagatgtatcaccataatgtcctttgttaatatgataggccaataccccttcacaatcaccgaacgtaggttcttgagcaaattcacaaggacatggtatcttacatttacaaacatcaaaccaatctcccgaagctttccaagaaggaatgtttgttgccatttagctagataaacatactaaaatttaagagtatccgatttcgaaacaaattttgtgatattcaaataagatgaagcaaataatacaaattactccaatcttttttacctgatttataacaccttctaacccatttgcaaattcatatccatattgtcattcatattcataccgttattatctctatcttgatttgaaccttccattatcattgtattcattttattctgagaatcgtgcattccacctccgtctgttgcaattgatattattcctgttattgataacatgcctattattacaaacactatgccggttacccttgcaatccaaattcctctagaccagactttctctgcaaaaattattaatgcgaacaatcccatccatagtaagttcatccaacccaatgcaatcataagtaaaaaatacggccaacaacatccaagacagtaaacgccgtgatacagacccatctttaacccatctttcaactgttttcctttccatcgtttcataaaaaatgacaagggtgattcgcaatagcccaaacatctcttcttcaatgggctaaattggtaaactccagacacaatgagcaaaattccagacacaatcgcaaaatcttgtatgctatatcctactaaaagattattcataattatagaccaaaacactagtagcataacacctgttaatgcccaaaccaaaaggtatgttcctataaatcctgatgttttaatagcccttttagaaagaagcgcgaatgatctggaattttgtctatttcctctttcttctaaattgtctgtacgctgattgaatttactaaccaacgacaaattgtcattttttttattatgattttgatcgttagagattaggcgattgtatagtaacaccattggaattatagctggaaacatcatggctgccatcccgatagtccaacttattgtaaatatagtaactgctattgggtccagagtcatcatagcctccatcatgtctggctgtttgatggaaaaaagccatgtaatggaagaaatggaaatgagggagataaatattattttttgagatttgtccaatgatataacgctcttaaaaaatggatttcggatttgtatggtaaaataggactacctttaaggtcccttgtattctatgactgagtaaagcgcattcttacccgaatggtcataattaagatgaggagttgtaattctcatcactttagtttttgccatttctgcaagtttccagataaaccctttgggtaattgtattcttgtatcctgttcttcaccagtaactggattaacaaagctttctgactgcacatctatgatgcctggaacagaaaaactactcttcttgccgtctatcttgactaagatgtctacaaactgtggttctaggaaaaattttattgttcctgcaaataaggtaaatggaccctcacctttagcttgacctgaaaaaatagatattatggcatttctttgttcgttgttagtattattttttgatataaataattgagcagtaccgtttccttcatggattgctttgggccatgagatagcggaaattacatcaattccgtcaagacttgtatcaccatagtttcctgagcgaatgtgaaataatacaagagttctacagaaaccgttggatgggaatccattgaaattacatggacatccataattacaattacaggtttcaacataatctgctttaaatgtccaagctgggatttgacttaaagtagaggtcatattcatttaatctaatcgaaatatattaattttacagtaatattggtaccatgattgatttagataataagattgtttgaacttttttaaaggagggttgttatagcatcagccatttgtttttgacgtcgacccatgtggatatcctcatgatttccaccgaacccttataccatacgggacttaatcccaccgaaccagctaccaatttatagtaacgatataagattattaatgctaatttcaaagaagttatttattctattttgaatattaattattaaaaagatgggtgagtaattaccctagttatccgtttcattcaaataaaattctcaggatattacactgctattctggtttgttgattgtctttggtgtaagggtgagtcagaatacatatttccttcattggcataacccgactgtccatctacattattttctgaattttcctgaacctggatgttgacattattacccgaacctactattccttcaaagtttgaaacaacggtgatagtaacactatcaggttcactctgtatacctgctttgttagtaactaccagttcaaacacaatatcgcgctgtaaaaggacattaggtgccgtaaatgtgggatgactgacgttgcatcgcttagactaactgacggacccgcaggttgaatccacttataagttagtgtttcatttctggggtctgagcttccactcccatcaagcagtacagcatctccagagtctactgactggtcagaaccagcattagcagttggcactattgaaccgatcacggaaacagtatttgaatttgcatttgtaacataaatatacccgttaccagagttgtagcccactccaaatggaacatccccatagtcaccgtatccaccacattattattgtggtctataaccgaaacggtgtctgaacgctggtttgatacatacatattcttattatcaaggttgtacgccactcttactggagaagatcccacgggtatagaatatatcaccccatcttgagcaaatgcctttgcaatgtcggagaacgggattactaacattataaacataaaaaaagaagagtttaaggttgcataaattaaaaaaagcatctcctatttactgtaaaagacaatggagaaggaatattcgaagataaaattgacaatctgtttaagaaattctatcaagtcgatgtgatgacatctagaaaacatggaggaactggattgggtttggcaatatttaaagagattattgatgtacacggtggaaaaatatggggctcacaataataaagatgaaaaaggtcccagtttttttagcttaccactcatgagtgaagatgactattagaaaatgctcttatgagaccctaagttatgcatttatgatttcatacaaatattgaaaatataaccaatttaatgaaaacttatctttacttttaacggaccaggaactcaatgagcccaagcacaggagagatattcgagctgtcaatgcagatatcaccgaaaggaacaatgggaaacatgccgtttcgacagatggcggtacatggtacctaatggctagtagattcttgaatcttgatcatcacattcattcctactatgagaaaagcataatcgaaagagcaatgcagtatatcaaggatagaaaagagaatttcgatgattactttccctgtaggttgaagaattgcaaattaaagcatgtgataaactggttaatcctttttgttcttataacagtgaatagaaaatgcttgtgaacatccatgaaaatctgcttgtaagttggcttcctgcaatgtcctgtttagcctacaatatctatacttttagttctaataatgttttctaaacatagccatcgctatatggatgacatggaggcagcaattgtttttattgttgttctaatttccgtagcttctgttggtatctttgcttgttcatgtttctgtatagttcgtttctagtcagcatgtaccatatgattacaagtaattctttagcggttgcaactatatctttaccgtgacccttcctgttctttattccgatatagaatgctcccaatcgactatcgtattttactgcagtgagtgcacactgtaccaatatccatcttaaccacggtgacccttgtttcgttattctacccgttattgtctttccagctgattctctaatagaaggatctagtccagcgtaacttaccagtttccagggtgtggaaaatcggcttacatcaactatttctgcggttataagcatggctgagaacacatctattccagtaatactaagaaggatctgtacaaacttatcatctctacatgcatactttgatatctcttttgatactacatctatctgatgattgattgtttggatggattcaattgacgttctcaagattatcctatctactggactaacctttgggagcagtgatttcaaccattctatacctgaaatactgaatatgtcagtcaaatcagtcttgaaatcatatttgtcaaggattgaatgtaccttgtttaccagttttgttttggttctcgatagtgttatcctgtgtctcaggaggcttcttttgtccctatcttcttgttttggtacgtatgattcgtatatcaaattggttctgagtagatcagataatatacttgcatcctgtagtttatctgattttatcttggcttctgctactatccttgttttgtatggatttgcaaggaatgtgactattccattctcttctaaggtatcatggattctcatccacatgttacctgtagactctagtactgcttgagtggtagcggtgatcgtggtggaattagtctttactctaataagtagatcgcttatgccgtttgcatcattacgaaaaaagaattcctccagtatctttcctttatcgtctttaagcgctgctctaaacactttatttttcctacatctattccaagatgattcatattttttctccttttcttattgtttgctttataggcggcaaacatccattcaccttcttttatgaggtagtttgatagccgctcaaggaatcggttcggtcagagccttgctctcatacggagcatgttcactttgaacctagccaacacacaatattgtaggatactacaagattttcatatcgtcagagctgttagcaacaatcaaatctttaaataccgtgaatcgggtgtctgatcgaatgcataaggatcctgaccgaaatcattcactatctgactacagaaagattgcaattaaagtttctatagcaatcataataattttaatagttgatactttaactacgcgacagatcctgccatataataacactacaggctcggtgctctttctcataaacatagttgtagcttacgggttagggtcatgggttcttttcaagtacgtaagaaaaatcagcgaggagatcatcgggtctaagtcatttattgatcatcttatcaagtttgcgatgataactcaatattcactcttgatactgttctcattaatttttgtagatttttatttgcttgataatagtacccctgttctctcgtcgttggcatttgcaataagtacaatttcagctagcatcattatgtcttttacagcctataaattctttctttggtttagagcaagcaaccgaaataagatcattttggtctatggtttagctgccacttcactagcagtggccatgatattcgacggtggtgccaaactacttatggttaaagtaatggaagaaccatctttgactgcggtgctattgagtggtaactcatcagatgcttttgtatataaacaatctgacaaatacaacggagacatccagtatgaagtaattaaacccgacacaaaaactgaatacatcgtaccggcggaatctaagatgctgtatcaatatctcaatggttggatacccataactatctcatttatctttacctgggctattacgttgatagtcttgaggaagtactatcaaaggcaaggcaaactgcctcggtggattaatcttctcatgatactcccacttgtactttattttatcgggagaagtgtcgagttctacaccttatttaccggcaacgtaattcgttttgatgatttgcctaatccgtacttatttagaatactatttagaataggcgttatagggggaagtttattatttggagtagcgttctttatcgtcgctaaaatgacaacatcgggtaaggttaaggattgtcttacagtcgctgcgattggagctgctatgattggcatatcactttcgccttcagctttgcaacaaacctatggagtagccgggagatcacttgagctattagcttcgcttctgtttagtcttggcttttatctttctgcagtgtatattgccaatgatacctcaataaggaaaagtatcggatcaattgataagcttgaatttttgcacttgttaggacatgctcagatggaaatagaaattgagaataagattgaggaggttgtaagaagacaacaacaagccctaaaagaatctcgagtaattcccccattagaagtagacgattatgatgttaagctgtatgtcgaggaggtgttgaatgaagttaaacgaaagaagtcagagatatcataaattcaatattatttaacataattaagttatcttaaatattcaaatatcgacacaatcgagtgttgataaatagcggcgattagctatagtctattaaattattaactagtgtgaaatttcacactcgtcccaccgaacctctaacaaataaagtagattacggactaatctaaattcgtcagttgcaattttatgatttatttacttttgagtgaaaaaacaaggtcaaatttgtttcacataccaccgaacccgctatcaatattagtaacaatgtaggacataaacaaatttgaattttaaatttatgttttaataaagaaaaggtctgtattatgtattctgatatttagcaaactttgatctatcttgtgttttatgtgtattcaaaatattgaaaattttttttattaccacgttaatctttttctttttctttttatctcaatctatagatatctggcatttttatgagttttgtcttgaggtactactattaagggtgagagtttaagggacgtctttaccgataataattacaacaagattattggaaataaagtataagactgtagttgagttaattactaaatgaaaatttattttgtaattaggattaatctctattgaataccgatatccgcactgctccctacggtgcatctatatctatatattaattcaataacttgcataccgtctccaaatgttaattcataacgtgtcgaatttatcttgaccatgtgataggaaaaaattttggtgggctaatctgaattctagctaatatctcagtactaataaattcaaacagtcacgaatgctcagaattaatattattaaagaaataaaaaaaagggatgtaagttctcactcgaattaattttacctgttttggcctggtgagtctgttgagggcaatgtgcttctatctaccgttaccttacaactctttgttctatcttggcccggttgaaagtctgtgagtgtatctttacccttaccacaatccgtggtgtcactgccctgtcccccggtgaccgtatcatctccttcgcctgcatagttcatatcatccccatcgccactatcgatagtatcgtcgccatcttgtccgtagtttatgtcactaccagtaccgctgtatatgtcatcatttcccgtaccaccagataattcattgtcaccataattaacatcatctccctctccgctaactatcgtatcgtcgccagttggggttgaatcaaaattgtctccaacattcctatcatctccagcaccactatcaatttcgtcatttcctgtacctccatagtttgtatcaataccttctccgctatcaatttcgtcatccccagctcctcccacatttctgtcatccccagcaccactatcaatttcatcgtttccatctcctgcaacgtttatatcatcaccatcgccactgtttatagtatcgtcgccaacactaccagaattatagtcatcaccatcgccactgtttatattatcatttccaccctgtccataatttctgtcatctccagctccgctatcaatttcatcatttccatcggtggacgttccaaattcggccattgtacattcaggccccgttgaaaatacgaatacttcacaattatcaccaacattataatcatttccatccccgctgtttatgacatcatctccgccctcgctactaagtggtgtcggtatgttagcttctctcccattatctccaacgttgaaatcatctccgcttccactatctattacgtcatcgccaccatcgccgtctcctgcaaaattgtcaccaaaattaaaatcatttcctgcaccactatctattatgtcatcgccaccatcgccgcttccgatccagttatctccctgattttgatcgcttccgtctccactatctattatgtcatctccaccgttgccaaatacgtttgctggttggagctcattatctcctgtattaacgtcatttcctgctccactatcaatagtgtcgtctccaccgtcgcaatttgaggtacaaaattcattgtcaccctcattctgatcatgaccatcgccgctgtctattgtatcctctccaccgctacccgatccactaaagctgtcccccgtattgccgtcatttccgctaccactatcaatatcatcatctccctctcgtccctcatttctgtcatttccatcaaagctatctatatcatcattttctgaggttcctgacaaattgtcatttccattagttccatcaatgtctgcagcaaaaacgaaattggaatcaagagtgatcccattcgggataaagaatcccgaaaatactgctattacaaaaattaacactgctgtttttttgctattcttccttgatatgctataatcgttatcaccatctaaattattcaattaatgtcctagatcgacgtgcaattgaaatattttgcaattaaacccagaacactacaataattccaataccaagctaacgcgataacacataaagtattagcacaatggtgcgttaggtgtttatgaagattgttactgcatttttacgatatattttccttcttgtcattattaagactgcaaaactaatttaacccctgacatacaatggataactttaaacatcattactagctgtgttctataaattggcatagaatcttgttgaagaatcgatattagcacttatccttccggttccgaacctggattagcatagtggattacaataagccagaccgtattggtacaattgaacgctaataccatatagaaactaatcccatggattgattaacaaacccatgtggatattcttataattttcacagaacccttataccatacgggacttaatcccaccgagtcagatactttttttactaatattgagtgataaaaaggggtcaaacttgtttcacataccaccgaaccccctttgtaatacacaaatgattataggacaaaccaattggtaaaacacgtaattcaaatagaatttacaggtttcttatacttttaattccttgcattttcttcgtcttaattgttataccgtgtttaatctttagatgaaacacaaatgtcccgttttttctgctgaaaataaagatagtcagtagatatacttggttatatacccatccagttcgacttactttgtatatagttactatcaagtaataaatgagttccgaaactatagaaaggatttatgactattaatatatctcaaatttgtggagattacacagtacatagcagctgtaaagggttagcggttctcatctttattttcgggatttaaagtttaagcagcaaagagggtttcaaacgcttctttaagattaaagattataccgacctgaagaattattttagaatatcaaaaacgacattttaagctatcaaacatatatcagattttcaaggtgatattatatactggtatcaattttacttgtataaatttcccaaattattttcttgatctttgatccaaactctagataaataaagatagaaataggtggataatgcatttaaactccaaacaattactattagtaatagttacaggcttcatcgctataggtgccagcatagtctcttatgcaggacctagctttggaacaagcctatcagattcttttacagatataaacaagataacaaatggactaggtttagacgaattggatgatttgactggaatcaatatatttggggactctagtgatgtttctaatgcttgcaaagaaattgaacagaagctaactggtctcgaaaaaacactagatggcctgcaagaagaacttcaatcagcgccaacttatctaaaatcagatcttatgaaacagataaacgaagttaaaggcaaaatctctgaaaccaaagcattattcaaagaatgtcaagatggaggtcaacagccttcattgccttcaaaagtcacaggtctttctgctacccctgtgagcactagccaagtcgatttaacatggaatcagaatcctactgatgaatcaattcagcattataatgtttaccgtgatacttctccagggttttctcgagatgaccgccacctgatatcacgaccaaccattacttccttctcagattctaatctgaatacaggaacaacttattattataaaattgccgcagtaaatagagatggaactggacctgcgtctgatgaagtttcagctactactgaagacgacaatccaggaggtgttaatcccgaattaatagatctagggtatgaaaaaggagaaaaggagacaggttatgaatggggtgctgctcaatatcaagaaaatcctagtgacggcgaatcccgtctagttcaagttgataaaactagtatgaatccaaataatgaaggggatccccaaggcgagtttgctctaaaagcaacggtcaagaagggcgatgtcgccacgaatccaaaagattcaaatcataatcctcaaggaaatcgggcggaagtaattcatatcaatcaatcagcccctcgcaatgatccttactataacttccaagaaggtgatgatgtttggttccattggtatactctattcccccaaggggattattctccaggggataagagattctatgtatggactcaatggcatcagaaggatgataacgcatgttgcgaccctgttgctggattcacagaaaagggttctaaacttagtatgaatgtctttggagataccaaatggactgacgcaaatgatttagattataaccattggtatgagatgctattccatgttaaatggtctcaaaatggtaatgtcggatatatggaattgtggcaagataaaaacagggtagccatggataagttggatagaaatattcattttaaaacgctagatgtagacggtgcagcgtatatgaagcagggattatatagagatgctgaaactactaatgatcagactgtatatcatgatggaatggttgtggccacttgtcctgatgaactcaattttaatccgataacggaaaagtgtaaatcgacacttccctattcctaatggttaattcgttagcactttactacaagtcttatgacattgacctatagatgaataattgtagaatatctatctctattcttatttatttggcagcaaccaaaaaagagaacatctagccggaatataataataactaatacaaattatcataccaaatcatgatccaacagccattatctccaataagtctagactatacttatcatcgtctatctaagaattattttcttggccttatcattgacataatcaatctttagtaagttcattctttatctagcatcattgtagtattcatagcgaagttagcccacttgtatatacctcataaaacactcgcttgtgtgaaggtgcgggatacgtcattgctattgtgcgggatccagatacctatttcctcaccaagcctgaggctccatttctttggggtggcaacaattatacgaacccctataccataagggacttaatcccaccgaatcctaaagtgtagggtaaaattactagaacaaatctattcaagaatcgtataagatcactaagatttctgctgatcagaaggaagatgactttcagtaaattttttccacataataaaaactaagtctgtcgcatctgccaatttataaatttcgtggataagtttatttcttgagaatccatcaaagtagatgaaattagctaaattgatagattctaatttctcaaaacttggatatatttccgtcgaaacttccatttgcattagatgaacttttagctcattcaagaatttgtatttgttggtggataacctatagatgttcttaacgtctggaggtacgagaagagtattctgaatagttagccggtctactgatttttctaaccctaaataaatttcttttccactggagagaactattttataagccagttgaaaattggcatcgctaaattcagaaagtttccatttttctgcctttaaccattcacgaatattactaattacttcctcccgagtaaacaatatctatcaatgttaatgaaaatttatgatataaattttcataccattattatgtcatctgacgatttaagagaatttggaaatctcaaatctattgataggggtaattattctggaattatcccttgtcatagtgtctgttctggtatggcgagggtaggaattaagacactgtttacatatattccgttagtcatcctatctactattgggaatagccttactcccccagatcttgatttgacgatgaccttttcgaaaccgctaaaagcaattattctggttatttgcggatacgcactacagtgctctaatatataccagcttgaagtcaatactgaatatactgtcgagattggcttatactacttgaattgtagaattgtgattatcgtttgcgagggattactaacatacatctgattaggtaactatccgcaatgtttcaaaagcatacaagcagccatcgaaaaactgattttcaatatcttataacgaattacttacagatttgtgattctttccactgaacccttatatcatatggaaagtaatcctaacgtgccatcttttgtattgtatacgagggggcaagtattgacaagctgtatcactcatgcgagtagctttattgtagattagaactcctttcattctcagagagagtaaaactcaaaattacgcgttaacctatatcaactttgttaacaacataaagatatgccaatagatccagaatttccaaaaaatcacaaaacagtaggaaaacattcaacttcagatggagattatactcatttggtttgggggccaggaagagcaaatgcagaatcctctaccaacaaggatgttcaagatgcatacaaaacaagaggagaagaatatgtccccttgggcgtccatggaacatttgtagctgttgactgggattcttgtatttctgacggagcatgtatcgaggcttgtcctgttcaagtatatcaatggtatagatcagaacaggatgttccagctatagaaatggtaaatgccgtaagtgaagggatcggagatgataataacagagaaggcagaaaagattatactgacaaaccagatcccattagggaaaaagcgtgtatttggtgtatggcatgtgtaacagtgtgtcctactcaatcaattaaggtcgacgaatctaatttatcagttcatgaggaaatgctaaaatcatttggttagacaccgagataacttctaagttattttgactatgaaataaagtaattttattatgagccatgaaaacttttcacgcgttactgtctcttactaataatatagtagaagagaacaacagttattgatgataatacaattaatatatcttcatggcaaggttgaaattgtgtaaggaaactagcactagtagtagcgaagggtggagtagatgttggagccgcgagcccggttatactaccaatggtaggaacaatgacaattatcaccacattcatatccccatatattatcaaatacggatggaaatttacagaaagatttgtaaaaggacaggataaaaataaaggagatcaacaacagcaaaaaccacccaattcagattaaaattcggatattgtgccaacttcttgacaatttttgaatcaaaaataaattataccatttttgtgtacatcaaccagaaatatcttaaaaaatcacttggtcatctctatcataatcttgctttaagcaaattgcaaatccaacatgaccacaatcatccgtgttacaagacatacacaaaggcatgcactctctataatcaacgataacatcttttgaaatacttttatcaaacaaaattacatacttattaacaagaaaatctttgacgataatcaaagaatctccagaacctgcatcttttgctattaaccatttcataaactccattgtaccgaaatcaagagtagtaaatacagtttccttctcagctatttgggattttccagacaaagctttcttaatctttcctttccaattaaggtacacacaaaaatgggtattaaagttatctaaattatgttatctaatatcatttttttaaaatgtaaaatgttgcacaattattacagtatttcaacctcaacctttgttcgaacttaattatagcgaacttcggtttcattgaccgacaccgcagatatccatttttcagttttcggataatcgataagaatggtagtccatataattttgtcgcttaatggaatttgatttgtcatagtctgatcgtgacgcaatcgaatagcctgaatatttgatttagcatcttactatacatcaggtttaaacaacgaatacctatcatgttaattcttttgagctttattcagtgacctgtatgctctgtagattgataggtcataaattgattgatagaactaaccagacttgaattatttgtaattaataataagatggagccattttttaaatcctgtatcttgtattgtatttgatccttattttgggccatagcatctgtgccaggaactgactgcgcatgaatgaagaatggttttgtaaagtttccttcagtaaagtcattttgtatatctattgtgtggcttttaatttggttaattgttttattatctttctcatctaatgctgttatccttatttgtcctccatccttagttgaagcgaattcatgagctatcttggtttgatcaaaccccatagcaagattacctctttgcatcatctgagtcatattgtgactattcataggttgcgataagtcattctgtaaagcatccctagaggattcttgtccagatgtaacaactaagctagtagtggcacataggaatatgataaaagtaacataaagggttccaataactcgtaaattaaatgaacctttcatgattatcgatgtatagactaataataaagaattattgttcattcgtagaataccatgatgttttacgatatagataagagtaattagcgaatcaaattgtgtgtgcaaagatttatcgtgaattttgaaacgagtcagtatcatctaaaattacaaaactaaaagaatgtttaaagaagtgtcaagaatcaatggatcaatttgcggaattgtcatttccaaaatgatggatatgcattatgaaattaaataagatgtgttcaccgcattaacctgctattagaatatttattagatatatcctgattttccccccataatatagtcatgtatcattatttattcagggtataacccacaattagcgccacgaggttcaagtcccaaacttcatccgatccatttttgtattttttatgacaaatctagtattacatagattgatgatgatcaattctacattcttattttcgttataaacttggttgtaaaggggcaacattctacccatttcatgactttcatgattgatcataatttcaaataactaaatgttaataataatgaaatataatgaaacttacaaatagtcctaaacaagcagctaaaccgatatgccaattcacttttctataagcatcgggtattaattcttctgttacaaaagacatgagtgctcctgcagcgaaactgaatataatggataaataatattcatttaatactaacgtaagtaaataaccgatcggtccaccgattgaaacaaaaatgaacaccatactccacttgtggacaatctttctcttagattcgtcttcggctatcaattctctggtacctacaatagtagccgcaaaattgccaataaataatgtcaatgctgtaggaaaaagacccggaattcccaatgcgatcattacacctatcatgattgtttcagggtgactatctgctaaagtacctataattatgagtctacctgatcctttcttttctttttttgtacttcactatttccattgttatcatgattgctattttcctcgtcaggagtactattagaatcgacaggattttcaaaatagtttttgcctataggagatggcttcttttgcaataaatagcgcgtaatactaaaggtgatagcgccgatgccaaatccaaaacctaaggtgtaaatatttcctaaatttatagcctcttcgataatactaaatgttactgttccaataaaaatacctgcagagaaagaggcaagatccgcacgtaatcttaatgggtgtctatattctttacttataattgaagctaccaaaaatggcgatgctacaaataatgatataccaatggtgaacaggatcgattccagagtcaagtcagaatattcaatcattttagaatcttttgactggcataatacgacgtatggtttttctgttagttgaacctaaattcaaaaaaaacatcgtctattcttatatccttgtgttgaatcttgtttcaaatattaattttaatttttgtattgttgcattattattcctttattttaaaaactccttccattattatttcacttaactccattctattgatagatattattgtcagcaatctttcagtttatgattaaatagtttgtttctgaaaaaccaatatggcagcagatccagtatgtggtatgattgtggatgaaaaaactacgaaatattcttctctatataaaggaaaaaatgtttatttttgtgtagatgcttgcaagaatagcttcgatagtgatccatcaaaatatggatattaatggatccttttgattaaatagaaaataactaggaattattaataagaatagtctgtaacattttataattcttttagaatttttttaaactcattctaaactcgtatgaaatttaatactcgtcctaccgaacccttataccatgagggatttaatcccaccgactccgctaccaattttagtaacgatattaagtactttaactaaaaatggttaattagaatgcattattttcttctgagctggtcaaaaccaaagctgtagtagcaaaaattttgtctgtttttttgactttcattgttattatctccttcaattcgtcaacactatttgcagaaattctcataattatatcatagaatccaatcacttctttgacttcgtctacacctgaaacttttaccaaagtagtagttccagctccagctgtatcatcgccatctgatgatgatggagattcgggctaattttttttattttatactttaattaaacatatgttattatgaattatttactcattattcagaatctaatattttgtccgcagaaatgaatgtgtgttgtgcttaaattcgatctttactaattagctaaaacatagtaatccagaagagcagcagacctagatgatcaatttatctcatttcaagaggtctagtagagattcctataaactaaaaactataaactataaactaaaaactaaaaatgaaatattgatagaaataaagaagaaaagactaatttatctttctcttctaattttttgattgatgatctttttgagcagataacaatgcatcgttgttgtctctttcaattctttcatatgctgatacatttctttttcctatttctgcaagatgtttagattgtttctttgtgttatcaactacatttttgaatatttcaatattagaaaatgccatatcattgaaaattctactcattgctatggtattttctgcataattattcaccaatttcgagtacatctctggcattcttctaaagtagtcttggctattcaataattggttatttacattttgtatatatggggtagatattgattgaaaagaatcaattgtttgtttttgatattcaagatagttttctgcaacatctctagtagcttgaagtgtttgttcttgaacttgattaacggtttcagtataacgtggaatctgatttcttgcttctctaatactttcatctatacttttttttgactcatcaaaagcttgttcaagtgattcggtgttttgttctacaattctattatataatctttgattactttggtaaatattattgttatttaaagatgaagtttggtcattaatttcttttttatcgctcttagacattgtaatattatatagtttctatactatataaacacaggtatctattggtttttaataccatgaaagggcttattcatcacaaatcggctcatattgatcaattgctcttttcgtgatgaatacttctgcatcatcaggattaacaaaaatatggccgtttctaagtaaatatctcttacatgatgacggatttctaaatttgaatggtcatgttttttattgatatctctcgtacaagcctccatgtaaacttgctcaaaagttacaggacttttcaaattactttttgtcttttcaatcaaactttttacaacaatatggactaactgtcgtacctcaagagaaacttcgtcagatagcatatttatttatctaaattttagatttttagtgggcgtcccaaattatcggtctggttattacatttaatacttgaagagaaataattatttgtattctcaccttcggtgtgtttatccttttcattattaaattcattttcagattttttcttttttatatggctagtatattttgaaataagttgaaattcttctttgaatattgtatacttccaatagtatttgttaacaagagtcgagataacaaaccaaataatactattgactatgacagtgattaaaaatccataataatgagccataaatgacgccgttattgtgcccccaataagatacggcatttggcgctttaatactgattataataaattatccaaaagaactactactcattgtttattgtataacatagtttatagacaggtaaaagataactgatacttttgaaaggtttataccattatctggagattacaataagtaagatatttctaaatttattatgtatagcgggtcctgtctattggacaaaattgcatttatttataggatgattatgaattaccatattaagatagatattctatctgaatgttaaatgttggagaacagttggataatattcttttcagacgacaattgtatatcatagatttgaagtcatccaccatgatctgaaggaaaaagataatttagataatgatattaaattaaggacaagaaattggtagcaaatagaaaacttattacgggacgataacccctaaatcctagttacattttacaatgtgtgttctagacacaaatgccattttgccccctaactatactccggtgattattgacaacgctgtatcgatatttgtgtcagttttaacgaattccatccctacaggagctataactaaaattccaaaaagaaatcttagtaaaactactataacgataattgctattataatcaaaataattgtccaaagtgttccaagcatatcttcaagaaattttatcaataatagtttatatacatgtaccatcatttatcatggatgttatatattatggtaatatcatacagaaaagaataatactataaaacatctataatcgctattgaaattacatgttgccacgtagttgattaatactggatcataattgattttgatttatcatttgacaatcattgtcttagtaatgcttcgcctagtaagcctattaggattatttaacccgaatgttactactataaaaacattgttataaattatatttcaatgaagactttcatgaatattagtattccagtggtattaaccattagtttggtattattactaaacacgggaggctccagtatctatggacaaattataggacagacaaatcagaccaatcaaactagtggacaaaacacaacacaacaagctcaacagcaattagatcaagctaatcaacagatgcaacaagctcaacaacaaaaacagcaagctgagcaacaattacaacaatcaaaccaaacccaacaacagcaacaatccaatcaatctaagcaacaagagccagaaatgaatgaaaaattgcttaattatacaaatgcagctatcttagctttaaacgacgataacacaagtgcagcacaagacaatctcgttcagattcaaaacgcactgatcaacgccagtggaaaacaagtagtagtagttccagctccagctgtatcatcaccatctgatgatgatggagattcgggctaattttttttatttataactttaattaaatatctgttattatgaattatttactcattattgagaatctaatattttgtccgcagaaatgaatgtgtgctgagcttaaattcgatctttactaattagctaaaacatagtaatccagaagagcagcagacctagatgatcaatttatctcatttcaagatctagtagagattcctataaactataaactataaactataaatgaaatattgatagaaataaagaagaaaagactaatttatctttctcttctagttttttgattggtgatctttttgagcagataacaatgcatcgttgttgtctcattcgattctcttgtatttcgatatttgttgatactgttgtcatcaaaaaaaacttgatagaaaaactttatatctaacccaaatatcattttcaaaaagttggtactagtatctgtaggtagattaaatctcagaggatagttctgggattttattttatcatgaactaaatattatcttggttatcagaagactgttttgatacaatcttaggtcttttttatcagtcttgttgtaataatttgatctcattaaaccttttactaaaagaatgttccgtgatgcctctgaaaggtggcgctctataacaaacaagtgtatcataaacatagtggaggaatagagtatgatctatcagtaacaggaaatgaaaaacaattatctattttgttgacgtgttcttatgggtattaggacagacacatctttttctatcgtcgtagaggcattctcattgccattatattgttgaagattaatattaagataggattcaaaatataaaatgaaggtcttttatattcaaaaatactcaaaaatgctcattataacaactacaatacttattataactctaggaatttcagaattaaattacagctattctcaaccatcacctcttacaatctctgaggaccaaaccagtcagcaaggaaacgatccatccttaatcaataccttaaaccaatctaatgaggtcccaattcaacaatccattaattggaatcaatcattaatacttgatcctgctaatgttttctgcaatgacgatggagcgtgtgggggaatagtagaagtcgcttttgagagcaacaacacccttgtattagaatcttataatagctatcgtatattcgatattgcagatatggcaaaaaatcttagtggctttcaaattattgatatatctacaacgcctcaagatggaagcataaaatatttagttgtcatgtcaaaataaattcattgatctattttttctcctcaagacgcgactatccaacgccgcgctttacgggtggcgcttcaatcttcacataggagacggagtcaaaaaatccgtttatcgatcctattattcaagtttaagtaatggaaacaaaagaataagtatgataatctattattaatggcatagtaagatatttgcttaatcatcagaatttttaaggcccctatttgttcttattacaattttgagggatcgtcaattatcgtacaacttatcgattaaacattgtatgttaattaatttcattgtcgtctaaaataggtcatgttttactgtatctatagattgttagctttctaaactttactaatataacgactttattaatttaagaaaggtgtattcataataacggttcttacctctaacaacctttttcgtaaagtcatgatattaatatttgcagcagtagcaatctttgcttgagaaattttttgtttatgtttcctgcacatgatgtaaaggatggctgcagccaaagagagtgaattcttacccgataatatgctttcattttgtatagctattagcatatcaatggactctcttactgttctctcatgaatattagccacgtcagcaattttccgaataaaaatagagggcttgaattggacgggagttatttttagttctcttgtaatgagcctataacacttgccagcaaagatctcatttgcttctactatttgtgaaatctctgtcaacgttcgtggaatactcgaatttctacatactacataaacacatgcaactatcaattccttgattgaccttccttttatcagtccctttgtaagagcctttttgtaatacaaaagtgcgtcctctatgcatactgaggtcaaggacaacttgtcttttaacctgttcaacagatctaagactatatttagatttctattcttgtttgaacaacttactattttagtaaggaattcaatcttattgtgttgccttttgttagaaaatctctttgagcttttagtattatagtctgcaatagcagttgacattccatggacatttagagttagggaccgtggatatccagtattagtatcacttgtataattatagaagtctatatttaattccgtatcatatagtttgtcctggacaaccataccacagagattacagatcttttcaccattctcataatcataaataacagagtgttgatgtgttggaatctgaggttgtgaatcttttacattcttggcaaccaaaatattagacaatgtctacctttaagcaatattctataacaagtggttgtttacaaattttatatttatttcttaactattacaaaaggatacaaatagacacaggtgctattctaaaggtcattgtcttttttggtacaagagtctaccaattagcatcctcagatcctacgtagccaagtatgacattgtccaatctccatacgacatggggctagcgtcgtcataaaagcggctttatatttatactctatgagagtaatgatgttagataggcctatcataaggaagagtgtcaatggttcaacccactgttgcaaataaggtgatctaagacattaatgacgggattaatccagttatagtcttattatagtttattaaatcatactcgatataaagtgaatattttttttatatgacagcaaaaaacgtatacacaatacctatctctagtgaattgttgcaaagaatagatagatcttctcctgctcatgttggtaggctccgaaatgcggtggattttattgctcctataggtacacctgttcttgctgcagcagatggtgttgtaactcacatcaaggatgactcgaatgttggaggtcctgatgcatcatactggttttatactaatttcattacaataagacattcaaacggggaatactctcgatacgaccaccttgattacaagagttccaaggtcaaagtaaatcagagggtactggccggtgacaagatttccaaagttggaatgaccggttatacttatattccacatctacactttcaagtatttgtattcacaggttacaatatttggaccgattttgatacaatagagattaaaaattttagaaatattttgtaggtcagtttctatacgaatatagtgagggttaaaacatggattatgttgacgatacagcgattttgaatgaggttcttatctcacttgagcttgaaatctctactgtagatgcaaataatgctagttctggtgataatcattatgtgaacatcgtgttttctgatggcacacgcctttacgagccttttaacttgaaactttatgatgaaatcgggttatctgaaatacctattagtattgggactttgccacaccgtggtaagaaaaaaaggttttctctcccagtcccacccgcacttgaccgcaaactagttgatattgttgaggtattcattcgcaaggacggtactaacggatggtttgtaggtagcatacttttgtttgctaatggccactcaatgcccttaattggaaatagtaacgtcaatcaattccttgacaacgataatgctgtgctgatgcttcgagattggtctacagggtcgttctgtgtcgccccagctaccagtgctcaagatccactgccacgatccggttaccgtgtcttgggtcctgtggtgggccaagtctcagacacttctgcagttatactatatcgggtggacagagcgggctactatcgctttatagcatttgatactgtcaccaatcttaaggtacatgatgaaacccaaaagatagagcccacttatcggttcaatttaaccggtcttctaccgaatagacattataaatttgaactcaattttttgcgcggtggtcttgaaactccagtgcctgatggatcaggatcagttcatacatatcctgctgaagggtctcttggaaaatttacgtttgcatttggttcttgtgtcaaatctaaaaagcaaacagcacagggatcatggacggctataaaggctttggcggaatcaccatcaaatgataatgggcctgtgcacctgttcgttcatcttggtgacacgttctatttttacgatcatgtgaccaaagaagcacctcgcaatgtagaaacaatgcatgctgctcatgtctcaatgcgacgtcatctggaattcctcgatatggctaaggtggtaccatcatgcggaatctgggacgaccatgactttgctggaaacgataaggacagcaaagctattgatagtgagttacggatgcaggcggtaaggacctggctacagtactggggaaatcaacccatttcacctgaagaaattggtaaaacaggactaaccactaggatttcttatggcctagttgatatttatttgcttgatggtcgatttagccgtgataaggacagaggcatatactttggtaatgagatagttggtaaagtacttgatacgatcgataagcgtggtgccgtatctccgcgggttgtaatactgggtactggtatcagctggaaccatcatgcagaggatggagagggttacggtcaaagtatatacgatgatgagcgagagcggctttatagagaattggcaattcgaatgggtggcactatcaacggtctcctgtttatctcaggagatactcacatcaatgaaatttaccatattgatttaggcgaaggtcgtatggctccagaattggtttcatcgccgcttacccttaatactggtttgagaagacctcgtgatattaaacgtgagcgcgttgctagtttctcttcaaaggaaaagcgaggttttgccaccttgacgattgataccttgaaagaaagtagagataactggacagcgactgtatgttattttcaggaggctgccgtagctcagtatgagaggcgttcatacgtcctcttaaatggtcagttcacgccatttacaagaatgtaaataatcctaatgatttagagtcttataattacatagtgctttaattaaaacaagattaatgggaacgtacaactgattctgaattttgtgagattaagtcccgtatactatgcgtgtttggtcggacgagtatgaaatttcatagtagtttagaactttttttgaatagtttatgttctataatctaattcttacaactgattatcaaacttttaattattaaaaaattttaaaacaagatttgttaccttgtgagattgcaaatcatcaaacttatagacaacgtcacatagcaacgcaaaacatcagggaatcaatgatatcattgtcttttgtcttatatgtttattatatttactgctacaacgttacttagtaaaaaggaaaaggagagatcattattcaactagcagtgaccgtcaagaccacaaggtacatggctaaggcagcccatagttaattaaaagatattgggacaataatcgaaagacactcgggagaagaagagaacgaaactgaaactgctgcaaatcacgtctttccaccgtctggcaaaagaaacgtgccaagtatatgaacagtggttgtttttccagcaccgtttggtccaagtaacgcaagaacagtgtcatacttgacaacgaagtcgatgccgtcaagcactttaaggcgtttgaacgactttaccaaccctctttactacagtcgcattttctgtcggtgtataatttttgattaatctattatgacgcataatatcatgttttttgcctgttccgcggatggacaaaatactaatccctaaaactgcagaaaccactcataaaggtattagattatgaaaagccatctttagggttaagttttatttgattaaaagtggttttaaaaaataaaggaaaagaaaacaaaaccacgttggataccaaagattctattggcagtaggaaggcttttcaacacagatcaaatgtgtctaaatagtaaatagcggagaggcacaatgtcttatgctgagtgccaaatattggctggcttccaaaatggttatctgttacagatccatccaattttatactaattgcatagtcccccaaaatattaatttgcgttggaacattgtttaccggtccttctctcatagttacagttgatgtaccattatacagtgtggagttaatggtgttgtctattgttggttgcccggctaatttaaaatcataaatcgaatgagtatggtttgcagtaccgtcaactttaaccatataaaatgttgagttgaatataggtgacatagtagttgaattgatgttagagaacttgaatgcgccgcccagtatccatgctggatcggctgaggtgccattattagtggtgctagtaatggagccccttattgcgtcatccgtaggattggtcagattttttgagtatgctgtatggagagaaccaaacggaatcactaatgaagataataacactactgcaaatataggcaaaagtttgaagaatcgattgttcatcaataacagtttaaggccacattatataagcaatgcccattttgtttttgaattggatgttacaattgaggatttattaagaattgaatcggatagagcaaccataacagtatccggttaagccttcatcgccaactccctgtaaatggaaaatccatttaatttaaaacagctttaggtattttatttaatcaattacaattcatagtagtcagataatcagccaatactcggataatgacaatacgccttatgggttaaatgggatatacgattaaatcagctttcatgtaaaagaaagacctttctattacatcgtctttgtgtataggagattatctatgcaaaacaaaaacattgtaactaaaaatgtattctatggaatcgcgggtttgactttactcattatagcaatatctttagcaacacaaacaccttctagtgcccagattccacctgaaatgaatggaaacaacaacaataacacaactatttatgaaaacaatgcatatcaagcccataattatgtaaaacttttagcgcaagacatggagaaccgacttgataaatctgcgacaatacttgaactcaccggtatgttgccagaagttaaaaatttaacctctgtgaatatgcttgacgaaacaataggacagcaaaaaggaatcccccaaaacgcggatatccctaaaagacaagtagcaaaagacattttggaaaaatatggagagtttcaggtggtgttctttttgatgccgaatggtgatatatatattgaggagccatattctcttcaggagaatctctctaaatctaattttgcgttcagagattactacaagggagtgataactaataatgatactttcctgggtaatgtaatagtatctgcatcctctggtcagaatcaggccgtgatggcggtgcccatctattcagggacaaatggatcattaacaggaatatgggctggcggcttggatatgagtgaatttaacaagagccttcaattattgaatctgaccaacaatgaacgcatagtatatgttgacaatcttggtaaggtggttgctgactcagacatacaatcatctaaccgaaacgaatcatttgccaatttgcaggaattcaaaaatgccattaatgggaagtcaggcaccgttaaagaaatagttgacggcacggaaatgctagtctcgtactatccagtcaaagctctttccaacaattgggccgttctgttaattcaaccaaataatggcaattctgttttatcatccagcaattatgcaataaccaataatagtataatggaaaacgataagcaaaaagaaatgctattacaaaatacaaagtgaaaaatgcccttgttagatattatggacaatcatctcaggaaatcgtatttgcacttcaataaatgaatgacggagattaacccaaccaaaataagttatgattcatttggttttgtgggaaatacactaattttccataaaacatctggtgaaccattttcagtcatatatgctacagatgcctcggtcagatatgaaactaaatgactagtaagatattgggtaagtatttgttctattttttttctattatgatgtattgagatttcaaacatatgttacttcaattatttttataaatagtagatcaaaattaaaatagttaaaaaggcgggtccagagatagtaatgccgatatcggtcttcttgatttgtataaatataaagtaggttctgatttagaccatgaccacaccttgaacaagaggctatcctttgttcacatgacacatctaggttctgcctgctcaatttgtttcgggccctcaaattattgtaggagcgatgttcactgaaatatttaaaattcattgatatttcttaacttttgatacttaaatcctggatatagcccataccgttactataaatatatagctggttcggtagaatcatgaggatatctatatgagtctgataagagtgttttactatatctatttatggttccgtactataatcggtacaaaataggtgtctgagttgatggtatccagtccgatagctattcgaatgttattcatttaattgagaatttaacatgtctattatatttttttatacttatatgaatccataaatcgaaggattcagaacctttgagtattcaagttcgatcttattatgatatctatctaaatctataaaaaggattgctagcttgcttgaatcaaatcgatttgttacatgtatgaaatgctagctcaccagatatcataaacaatatcattccttaaaagatgatgctgaccaatgagtaacagactgcctaactattgttcagggacactcttgccattgagttgaagtgctactaatttgtagtccctattctggcgtcacggacgtcatctactctatgaatgcaatttgtaacactgccatcatttcttctgcaatgagatcatgtaattggcactattcaaagcaatccggaaactgtcaaggatatcaccaattccatacttaatgcaagtcatctggatttcttagatgcagagtctcctttgccaaatcactcttacagttttttacaaactctgggccattgtttattcttcggcacagtaacctcatcactggacccacaataggaatagtaatcattggtgttttgaaaggaatgcattcacaaactacccaataatcttaaatcgaaccattcattggttgtaagtatgaatattaaaaagatctcctgcctctgcataatggctttaattatttttgtattgacaatcacagccgtctctgtcaccccagcagcaatctctcagaatatgaccggtggtaatacgaccggacaaatcggtagctctcaagcagaagttgaggcacagtgttcgcttagccccgcttgtattacctgaaaatacaatctaatatatcggtgcctaacacagactgtaaagttaacgataaatctataggtttcatccgcactaactatttaagatttatcagacaataagaaatagaactcgaccagaggtatcatataaaccattaatctatactttgacgctctttcattaaggaaaacctcaaaagcattatctagatttgttaacagaagccacactgcgataaaagactagatacaaaagtacctacctcaaagaccattatcaaaaacaaagaaaattgactaatacatagttgatgaaaccttaatcagagttggttcggaattaatctggctctagattgcaatccaaagccagaaaataggataaatctcgcactatccgtctctaaggaaataaaaatactaattgctgagcgatttttatcaagtgttgccagaggttacggaaaacagcctttttcaactgactgttgtgactctgataatgacttttcatgcagcataagagataactgtcctcgtacttttgatccagatcagaaagatatcgacaacgatgggataggcgacctatgtgattaagcttaaaagccaacggaattcttgttgcattgtacgttcctatttcttgtatgtaactaatattttggtttatttcatatttaacatcaactagatgatgaatctataatttatttaatattttttaattaagataaccattccaataatcatactaagagacaatgatacactacaaggtgatttagatgcaatatgcgatgaaaataccacatcaactgatattttgcatatttgataaattctaaatatgattgtatcttacatagaaattacctaaatcattacatccatcacatattccttccactttgtagaaatactgtgggctgcgttcattatctggatgtggcatcatgttctgcccactttatttctactaggatgtttaattatagctgaatattttctctttttttacgaaactatctttaggtaatagaatactataattatagtagcaaatctcgtaatcactcactaacaaataacaccataacctaatagattgtaattaccgttaaaagatttgtaatataacataataatcctgataatctgttaatattataatgacatctgtcaagattacaaaaggcttcttttgaggatctcaaggctatcctgttattacaaaaacaagcttttgtaagtgaagcagacatatacaatgattttgatatttctccccccattacttcaaacattagaagaattaacaaaagagttttcagaatcaataattcttaaagcgtaattaggggatgatatagttggatcggttagaggatttcaagtggatgaaactgtatttatcaaaagattaattattaatcctcattttcaaaatcaagccatgggaacaaaccttattaaatcgattgaagattcattcaaagacaataaaagatacgaattatttactagtcataaaagcaatagaaatttgcatctgtataaaaagaatggatacaaagaatttaatcaaataccaattcatgagaatcttactatgatatatttggaaaaacatgtgtcttgcagataatacttgaggttgtaataggcaatattgaatgttagatggcctttctagatagttcattaattctgtaatatacatggctgtaatttcatattctgcttgtatacaaccctcacctaaacagataattgaaagttttctgaaggagaacttaaatgaagcagatgtatgagttgagtaattaaccctcattccttgatttatgcctccgcaagctaaaagatatctgatcagccgttaaatagtattttgcactttattaattgaagagaatatcttcatttcagtagggatgggtaggaaaaaggcattcagacctatctaacttattcctaccatggtaacatgtagataattagatattcgcccctcgctctgttatgattttgaataggatataagattaaaggaaatgatttgaaaggctacgtttaaggtgttgtgcggggttaaattattttatagaattaatttatactacctgggaattccgaaatttttaggtaaactgatggtataagtagatttatgttagccgatctttcaaattagttcattaagcctagtctatctgtcagtatttttgtactctacttgtatacaatcctccattaacactgattgttactttaattttaattaaatagatacttaaaatgtcaaactatgcaatgacagaatataatttattaaatagaaaatcaaaaaaatgcagaataaaactcacaagattactaatgcctttttactattttctaggaatatattattgctagccctttatcatcctctaatgccacgttttaacctatatattccgaatattattacagccttaaaccttttataagtggtataccatagtaatggctattggaaatgtcctcaccccattcggtcatggtggtggacgatgaaccagagatcgcaaacctttatagtgaatttctacaaaggtctggcattaattcgacttgcttcatcgatccgctactagcccttgagcactataaccaaaatcctaatcgatactctcttgttattacggatttgtgcatgcctagccttgatggaataagacttgctaaaaggataagagaatttgataccaaaataaagatactattaattacagcattttatttcaatgacatgctagatacagaagaatatagagaagccaaactgacgggactaattcaaaaaccgacaaagctctcaatattaaggcaaagaataatagagttgttgtcgaaatgaccacaattgaaatccttttttatgaataatcagtttgattccgatcacttagtatttccaccgaactcgctacctatttatagtaacgctataatgtacaatcagagatgatgtaattcttattctttagctataaaaaaagaaaataaaggtcagtttaagtcatcctactcggaatatttgagattatcttaattagacatttttgattctcaactattttcagcttattacactactgtattaagtagaaggtaagtagaaggtaagtagaagatagattagataaggaatacaacagacagcacagacagtaaaacaaaaactagaatcaagtaaattgtcgttaatccagatcaaaaatgtctacctgttctttaaacaccatcaactattttttatttccatcagacagattcaaaaatttttatcgttttttacctcaattttttagtatttattgatagcgttgatatcatactagcaatcctaaacgtatttaatctattaaaaaataattaataaaactttggtttatttttctgctcgaaacattacaatcgataatatagtttgatactcataaacatataactcatgagtttgatattaacggtatgtgcattggtaatagctgggctcatgacagtatacagtttatcaatatcagatctagttttttgtgttagcaaatctttttatgatgataatgaaaaatcattgccatcctatctcagtggagggaatttgaagcctctagcggacaagagtttggtagaaatagtaaaaagttttaagaattcttcaggattttacaaaattaatggaactttagaaaatcagggtacgctcatactttcagatattaaagttgtaaaatattacaaaattccttcggtaaatgatacaactttaatatgctatgaggaaaacggtgctagatgcgaatataaatcaattaatcaattaccttcacaaagttttttcttaaacattcctgatccaaagatgaattctaagtaatggtcttatattctcatacgataaaaaatatttgcatatagaggtaagactgagtctagatattctccaagatagacagatccatgatatatcaaaattttacattagcggtctatctctgtctttattttctcttaaaatcctcatcttcggtttcattgaggatattttatctcgattaattagattaaaactaagtatattgcagttattttactactacttctcctaccattgagggatgataaatgcaataatatggatattcgccagaatcatcaaatttgatactaaaatattgattaggtataattgcgtttgaatcaaattcttctcctgcatcattatcatcatcttgtccagaagttacggtgtgtgatatagcgtcaccgttataccatgtaattgtttgacccttttctattgtgataggatttggagagtaggaactatcaccatttatcccaactatgactgccggaatagaattggcattctgtgaatcagcttgctcgctattttcagactgttcctgttgcgttttaccattaattgtcgtactaacaggagaagtgttagtactatttgttgcgctagcggaagaaggtaagattctaaaaagcgaaccagtataacttaacacatacaggtatccatctggccctgtttgtaggtctgttatgccgccgaacccttgaccaaatactataggttgattttctttaggatcattaacttctctatctacaagcggtgctgtgttttctacatatccactatcaagggatagatcatttcgcgcctcattaagaataaatcgatataaaagaccattatttatgtcaccaacaaacatgttattttgatattgtgttcctaacttatcggaattcagaaattctaacgctgtaacgcctattggcgtaacccaagagaattttggttcggaatatgacccttttccaaaatataccaaatcttcaggtgttgctcctgtgcctaaaaagtcattctttgaaaatccttgaattaatgaccatcctccattaaatcctggatataccaaattgatttcatcaccagctgtaggtccattttctgtatcccataagttaccagtcaccggatcaaaatctattccgaaactgtttcgaatacccattgcataatacaaattaaatggagattcgtctccaaatataatatcgcctttgacgatatcaccgtcttgagtgactcttagtactccaccaagtccatctggttcccgtccattttcattattctgtgcttgggtcctgtgtccgcccacttctcctattacataatagacgttgttatccggtccaattcgaattttacctccattgtgctctcctctcccattatctggaattgcaggaagatctaataatagagtgggattttttagttgcacgtcaacatattcatatcgatataatctgttccctgacgggtcgacattgtcttcaaaatcactaccatcctcatcgttgcctgattcagtataagataagaaaacatcaatttttccatccggttgttttgctaaggcaatacctaatagacctcgttctatgctattagccacagccacatcaagcactggcgtatcttgtatctgaccatctataacatgcattaccttccccgtctctttttcagtgaccagtatatcgttaggtcctaaaaatgccatactcgtaggtttttcaaatccaccagttacattttctacaacaagattgttatcttttacactgggtccattaggtgatacaggagcttttgcatatgctccatatgataaattaattgtagaataatttgaacaaaataacaaaaatatacaaagggcagacaaaacaaataacttattacttgttttttttaccaatatttactgattgtgaatggcgtattaaagagtattcatgaactaactagtatattagacatcaactaaaactaatcataacttgtgtattgaatcaaaataaccctagtatgatatttgaggtaaaagtataataacattagccttagaatattaatatttaattcttaaaatttcaaacatcctttttctaaacaatatgcgaactgagattgataaaaataatacccatagacttaccaccgtaaattctgaatattctatcatttactaaaagatgtcttattagcgattaataatatttttcctatcattacaggttaaacttctcagattaaattaataatgatattaaaaaataaaacacaatcataaattctccaacttgctttaactcctaagttagttttcaatgaaactttggactgctttcatactatttgatacagtgtgactcagctccacattatcattcacgtcttaattacaaatcatttgtattgtaatattagtaggtattggatctttatcaatttgttgagtataacaattattgaatatcaatgatgccaaactttgatcgttaggatcagaataggatggaactaataattgctctccgtaagcgcttaaataaggagaaaagagagatacaaaatatgccatggatatgagttgataatttcttatttttctatacatgtgatatgattttttcttaaaaagttgttaatcaataggtcaggaaattatatgatacaacgggtcaaaccttggtttcaatgcttttgtggttttaattctacgaaaaagcaaggtatagtaattctgtgcagtgctaataccaactattaacattagagtgggagaatgactgtattatttgtaaatcaaaagataaatcttaagtactaggattactaaacatgatactctcgtattcaaaaaccacaggacaggttggacatggtttaggacatcaagcttattctgtcctgagtctgattaaataatatgaaaatatactgaaaaatcaattgctttactgaatcgattaaagtaaatttaatgtatatcaaataatattaatggtagtttagaaaggtatgactatgtcaaaccaatatgtttctaaaattgagacattgtctatgtacaaatttactgattatagaatcgcagtatgatggttatctatcgcattctgacactcttgttaatcgccattacacgatttaacaaccttagcaatttactctgtcttgagggcaagatcactatactctactattcttctttctgcctggaaatatataatctctaatagtttctaagccagccggttcaatgaaatatatcttttcgattccattataggatatgaaagaactatttagcaaatagaatatgtattctctcagaatcaattcagatgttggtatcactctctgtacgctcaaatatatttcagagaatgatgatccataatacattaatacatgctaataatactggctctgtaatagctatcttgagataaactgaaatagtattcttattatttgtgcattcatgattcatattactatttaccacatttctgtccaatctactcaataatgttatttgatatttcgttagtgcctcgtgaatcatcgctttcttcgattccttctgtagcattggttaaggtgttgttatagactttattttcgacagagttatgataaatatagattccttgactctcacagttacttatgtcattatcataaacttcgttgttaggtgattgagacaaaaatatacacttttcctcatcatgaacatcattatttcttgcaatagaatcggacatattcctgctaaacataattccggaccctgcactgttatagacttcattaccttcaatagttatattataacagtcaagagaacatattatgcccattgctccatggtcatgtaccgtgttgtttctgatcaacatatcatgagttgcagtatgagggtcaaaaccatacataaagttatgatgaacatgattgtcttctaagactaagccacctaccccaacagaataaaatccaaaccgatcatggtgaatctcattattctttactatgcttgttccattattgccatagtagctaataccagaacaaccgctaccgcattcataacctaaataagctatttcagaattggtaatgttcgttgttccggtagtttcatcttctatttttatatatggtctgggtatagcatcaataccagtgtgctcaaattctctgctaggtagtatgtcaacttcaaactttatgaaatcattattctcaggatcccacgaagtaatttttacagaatctataattaaattaccaaaaaccgtaatagaatttacactatctcggtcaccatcaccgttcttatctccagctaacatcttaagccatttggtatcactcgaattaatcacaagtgttgaacctttttcgactactatggtagcatccaatatccaagtattgttagtggaattatcttctattcttagaatctcttgattttgaatactgttgtatatatcagtaagagttgaaggatgcgaacaagatacagtaattgtgtttttaccactttcctcatcggaatcgtaactgatgcagtcagtgttactggcttgatccacttcctgagcaagtgacctgttatttattaaactaggtccactaaaagacagtatgataacgataacaactgtataagacgctgctgagataaaactcacgggccgtttcaatttgtctgattgatgattattctaccagattataagaattatcttctcaatgttttagaaatgatactcttgaaaaatattgagaattatttgcaatattcaaaataattacaaaggattttgtacaaaataaattaggtcgtacttatttattgactaatcaccattatgtttttctatcactatggcgataaaaagacaagctcttatgcatacaattgatcagaatattagtacaattttgaacttgtaggtgggatcggcttaattcgataggtaataaataaattgaggttaacagttattgctatgtaccttaattaactgtaattgtccttgttgcagatgctgaaatatgctcagcgtcaccagcaaagtatgcttgaattgtatattctcccgggcttaattggactcctaaactgtatttaccaaactcatttgttacaacgttctcactattctcatttatacctgaaattattacggtagcacctcctatggctgagtccccgcatttaagttcacctagtaaatatacgggaagcgtacttccagaagcaactgttcctcccttcggatttgaacttaaacttaaggttggttgacagtcagccatttgagccgatacttgatttaccgatagtaatgtcatcgcaaatacggataaagtcaaaattccagttacctttgcaaatatgattagtttgttattgtgattgttattcataatttacatgacaatacgtcataaaatatttaagagttcttacttacttaaggggtcttacttaaaaacaaattatgacttgaagatctcggaccagtgtaatgaaatttgaaaaaatattcaaagttcctatctcatatggttgactttatacttttgaggtctttcattaaagcgaagacatcaattccttcaagactaatatcacaatagtttcctgatcgaatgtgaaatagaaccagagctttgcagaaaccgttggatggaaatccattgaaattactcggacatccataatcacaattacaagtttcagcctaatctgcttttaaagtccaaccagaaatttgatttaaagtagaagctataattatttactctaatcgaattatattaatttttagagtactgtagataacatgattaattttagataaataaaattatttgaactattttaaataacggttatttttacaccactcatttgttattgatgatggcccatgtgtatatcctcatgatttccactgaaccagatacctatttatagtaacgatatattagaatttgttatatctcaaaaaactagaccatttttctgatcatattattattcaagcattgattaatccgtatgcttagggaaagggcctgcataatacgaaaattttacattttcccttaaatccaaagatgtaaaaagacaacatccttcattgctaaacagaggtttgagttttctaaatcttgaagaagcatcaaataaaaatgtactcgactattaaagctcgccaaaaaggggaaaagcctgttagaaagaacaatgcattacataaagggcaaaacagaattttaagatgattattttccatgcagactagaaaattgtaaactagagcatatacgggattggtcgaatctattcattgaatatcacaactaggagttaggaagagttaattgaacatagcaatagacttattattaatctctatttcttctgcaattgcattaatgctatgtgtagatttcgaatgtaaattagaattctttgacatgtttgctgacaggaaatagatttgttaaaacaaagaaaatctattcggtctggataaaataatcaagtagaccgagtaagtaaaaagaaatccctttctaatgagtccaattagctcaattattcatatttatttgacctgtgaataggacatatatatgaaagtggaaaatctattattatcgatcattttagccacgtttatcgccggatttggtctatttgaatcctcaaacactagtgcgcagaaccccctttaatgggcttcggaaataactatccattgaatcatataattaaactagagtttgaatctaggacaaacatacattgactgttttgcagttgtgttcttgttaatcattactatagcctagactttaaccaaatgatcccaaagaagataaggacggtgttggatgagttgaggagagaattaagttagtctaaacagcagtaacgataaaaatagtcaaggtttgttgtttagcgaaatgtttaactgattacagaacataattcagactatataacggatattaaacgactttttctagctacaatgttaaataatagtcagaaagaaattaactattgaatattaaaggtaaaatgttccataattgtacgataattatattgaccatacttacattgtattttcctgtctctatccaatctaatccagtatctgcccaaggtgacggttatactcatggatgctcagatggaaaaatatccaatccgaatcaaagatacctaaatcagccaggaaatggacctgaaaatcaaaatgaagaattcaggaatgagtatatcaaaggcttaaatgattgttatggcagctacaatacctgttatgatcggggcgtccttgacggaatgactgttaacgaaaacatgaggacaggtcaatttgagagccaagttcaaagatacggtggttgctacgaccagggctttcattttggatgtgcattggtaaagggtactacagaggcttgttttgattatctgtatgagccgccccaaaacatcgggcaaccatgaattaattcatggcagatccagagtgatcagtcctatttacaagattaaaatatgaagaaaatggtctaaccatttctttgtactttcataaaccttcggttacaaataaatcgataatagctattgttaattattaatgctaggttgagtggttttatattgcctagttttgtttgtttggctttctttggtttaatttcatcaatcaaaatagccatgctttaatctctcaagatcagtagattctattgttattgtttcaaatactgattgtggagagtttgtcataattcccaaacaagtaaatcttaaaattgacaagcagtcagaaattccgaaatgtccctcaaaatggtcaataactggactgatccagtattgtggacctgatactaacgaaataattacacagagggtaacaccggtgctagattagtagaggaaagagttaaacatacaaaacctccaaataatagaggttgttcctttagacagctctacttggattttactcagcaggtcccatccgtactgaaaaatgtgtttttggcggcctaaattggactgaatattcctccgccggcctggttaaaacattggttgcctactgctacactgcaatccggaccagtttgatcgccatatgctgcgacaccagatccggtggcatcactaccttctcctatagcaaatccgcaatagtcaaaattactattatcagtaccagaccctccattagcaacaccacctttcttaactctacatactatctttatattctattggggtgttagctacatccatgaaggaacacataaaggtaacaacaacaaatgtaattattctaacaacagtaacaatagtattcattggtgcatttatttgtgctatcactatcttaacaaaagactaatgcgtagtatgtaccaaatccagcgtattctggtggtggagaaggaccaccgatcataccgttccatccacctaatgatgccgctcatagcaaacagcaagaaggggttaataccaacgaacccacatagctaacagttcttttaaatggtttgtactaacagatggataaaaaatgataaaatttataccagtcttatctaattggaaacttcgatctaacttagaattagtgctttcttcctccaaagcctccgagcctcctgatgcccaaggcagtttttgcctctttcaatacatcatttacatattctatcatcgactcgagagattcctctatttccttccttcttttttcagcttcaaatagttccctcgtttttttttctacttctttaatgagagtgttattccactttgctaaaagtattatcaatactactacagcgacaaaggttgaggtaaataaagttaacatctttagattctcggcggaaattacatgtcggatttgagagtgaatttggtccgtcggtgtgacaatctgtacaaaaattcaggtctatctccgatgatgacaggagattgggtattcagtctttctccccttccatagtcataaatagcataacccgagtttcccatcaggagagagcgagtaaggttgttcaatattgtattgtgatttataaaatcctgtacatagttcccaaaatagttttgccctatcaatttcttgtccacaccattggctaggatagtccccgatcgatcaaaagcgaccagaaattgtctgtccccgagttccacatttccatattttgcaaaaaagggctcagtgggaatagctgctcctactattcctatatattggttcgattctctattgactatcggatatgttatgaattccctatagataccctgtctttcaaatccaccagataatgttaggctgaggttggccttggtgtctctgacccaatttcttaacgagaagtcttgtcccagaaaagtttcagttcctctgggtgccatgctcatacgtactactccatcctcgtcaattacaaagagcctatttacaatatcgtcgtagttggagtacttttcttttagtaacctttctggttctgttcccattaaatcgccttcttgaaagtatttagatgtcgccaatccatctaacatggtaattacaagattaagatctgactgaatatgattggaaatactcttcgtggactcaagttgtctctccttctcctcctcaatgagcctatctctaaccgattcttcagtaatgctctgattgtagatgagtaatcctacggacaaagataaaatcaatattactgatattatgccaattttcttaactttgtccaatcagacccattattattaccatcttagttcttattaaccaattctgggatgaggccgaatttgaatctaggcttatatagttgactttatatctcactataagattgctacacccaactcttattaccgctataggggtactagccttttccattttaacgaattattcattgagttttggaagtaatttgcagcagatagataactcatcgaacaaagaaaatgtcacactttccgcaatccttgaagaccaaggcgatccggcaaggtggaattcgctgattgggccagctctggataggcttagagaggagcatcctgacatcactatcaacatcgactacaaaacttttccttataatgaaacaagagagaagttattatcgactctttcggaacacaacccaattgatcttattacacttgaccagatctggcttggagagtttgctgaggaccgattaattacggatcttacaaactacacacaaacctgggatcgtcagaaagattggtatgaagtaaattgggatggtggtgcattaggtgagaatatttatggtatatgggcatggactgatgtaagaggaatttggtactggaaggatttactagaagaggcctcagttgatcctaactcattgaagacatgggacggatatatcgcagcggcaaagcaactagattcagtacttcgatctcaagggatagaaggaattcatcttacgggagctgggcattcccctgacctctggtatccatatctttggatgctcggtggaaatatcttacaggagagagaagggcatcccacaaaaggtatttactggttccctgcttttaatagcagcgaaggagtaagggcgatgaatttcataaaggatcaggtggatgcaggcataaaacctcaaaagaatcatttctggggagaggagtttcttgatcgaaaatttgctgtaatgatagaagccctacaacatcatatacccataacgactcccgacaaccgatctgcatttgaagagaaggtcggatttatacccatgtttcctgttccacatgaaggcaatcaaacttctaccttaatggggggctggctgttcagtataccttcatcttcaactcacaaggatctcgcatgggatctaattaccattatgctggaaccagatattcttggtccatatctcgttaaccatgcaaatttgcccactcagattccaattggcgaaggtcctttttcggaagaaccaatgagtgttataccatattatgacgatttgatttccatgattaactctggtcatgagagacccaatatcagagaatattctcagatagctgagtttgtgaaggaggcactagatggcgttttctataaaggcgcggacccaaaacgagctctagatgatgctgcctctgattctgcaaaagtgcttggttggttgtaattcacgatatataaagctaccatatgctgtttctatatggaatagaggcatcgagaatattcgggcattgacttgaggtgtcatccttgaagcatcacacgagatcgcagtcatattttccaattcattgcaggtttaattgtggagtaatgaaatatctcgacacagattgcatacagtagtgtattccatataccgccgaatctgctaactacttatagtaactactggtaagacaatgaagtatcattctatgttaaattgcttggatattgataaataaagggatgagggctttacccagtcctgcggtttttttgtcttatcctgttaaaagtaagatattacctgactatcatgctctgtagatcgtccttggaatacggggggaccagaatacatgtttccagcatctgattgtccacctgcattatttccggaatttacctgtacctgagtttttatgttattaccaggtccgagtattcttttaaatgataagagtaacgtgccaattactgaaaccatttctggaattaatttttaacatacgtattttgcattacctgggttattcctctatccaactggaagactccaccattctagtcgctatgacctcatcctgaaaaaacactaataaactcgtcaaatgggtccgtcaagatgaccaaaataagaaaaatctatcaaattatacgatgataattctaaaaaattttttctcaggtacacaaaccttcactatgaactaaccttgtagcaatgactatttatctatgtacattataagagaaacattgaatcaaataactaatttgttagtacttttagtagtgactttgtttgttttacctgtctcagcattcatgtatgctagtgggtctagtgaatcatcaccgtctgactttcttcccgataacgttgactcatcatccggtagtgagtctactgataataatgacggcacgtcagacagtgggtcaactgataatagtgaatcattaccgtctgactttcttcccgataacgttgactcatcatccggtagtgagtctactgatgtaaatgccgattcatcaacaatgactacggaaaataatcccactttaccaagtgaatctccgttaagtaacaatactggaaatgtacaagaagaagatctggtcagcatcatcctgaccttacacaaccaagaacgtgctgaagttggggttccaccgcttacgtggagcgacaccctcgccgcccacgcacagccttgggccgataatgtatatgcgacaggtgatgcgtcccattcaagtgggcgtgctgacttcggtttttatggtgagaacatggcaaggggaggaggtccatcttacgcaactccgtcctggctagctcagacctgggccaacgaaaagagtggatatgtaccgggcacccccgcgtccgatagcactggccattacactcagatggttgacacgcaatcaaccgaggttggttgcgggtttactagcggacccggtggtctatacgctgaatatggtggaacgaatgtattggtttgtcaatatactccccctggcaactggaataatcaaccaccctattagaaggacctccttcctgtcacggtaaggactcgcctttcaccctgaaccaagaccaaagaattgcttttacaaacaaattaactgacaaaatgagagtgaggtggagtctccatcttttattttttaaaagaatttgaaggattcaaaaaaccatagtgaacaaatgatactcttatgcatttaacggagtttccttacgatgtgaaatttttgagtaataattaatcggtctagtctattcataataattttatcaaactcaaatttactagatcaataatcatttcgacaaggtggagcctacaggaccttaaagaataaaattcacaatacaaaaccgtgagaaattgacgttcataatggcaaaactctctacattcagaaaatagtatttcaaagcagataaatattgtttgtcagttcttgatttgcaaatttggtcaaatttgtttcacataccaccgaaccaaaatttaggttattttttctagagaatctgcttaaaaagtcactgaagatttaacatcttttaaaattctcgcatagatggaggaggattggctaaaagaataaagtggatctagttaaggatagtatgagtcattactcaaataattcttaaagattcttcccaattgtttattggtatagttttttttctaaaatcaattagggagagatattgtccatcaaattaattccagttttaattttcatagcgctactatccaatattctattggatatagatccagtcttggctgacactttagtgactagtgcagaagttggcgataatcctttgttgttagaatatgatcccaatcgtggtaaagtcgatatattaactcgcgattctaatattctaaatcaaactgttgctccatggggttgcactcctgaaataacaaggggctgtatagacatgaccaatgcatccagcacatatcttagcattgctataggtgctgttgttggtgcgttaattagttggttggtatacgctttacaaaaaaggtccactgtcaaacaagatgaaaacctcaagagactcaaagagttagatgaaagacatgataatatcttaaacgtaatacaacaattccaaaaacatcaggaaaaacttcttgaacaaatacttggtctggaaaaaaaaattgactcattaattgagaggaaatagaataatacctgatatcattagaggataaatcataagtggatgtatcaccgatggtaatacaaaataactataattatattttttaaaaaagaaatgagctctcaaactctttcagattcttaatctatttgtacattctacatattacccaaatctccctcaagattatttctttttgtctttgagacatacttagttctgaaagtgttagtcaattgttaaatccaaaattgaacgttaaaaatatggatctagccgacctatccagggttattttgtgtgcaagataagtcaaacatgtttacataccaccgaggacaaatacaagatagtaattcttttaataatttgttataattgttataaagttatctatgaagaatatacgataaaatgttcatcttgttacaaattatctacttcaaaatacgacgagactgtttgtgatgaatgccctaatgaacttgaaaaaaatagtatgtttaatgcattataggataaacttcaagtctatttattccccgatgtcattatcttttttagttcttcataaaactccttgcttggagatgaagtggataatgatgtttgccattgtttttcaattgttttaaccgctaattcggcagctttgtctatattatttccccaatctctttcaattattttctttatcttctctacatgaacttcttttaaagcttcaaaaaatgcgctttccaataatttttttgcaccttcaattggatcggtgttgcaacacgaacaactggtactactgccatgcatagtttcacacccacaacttttgcattcatgcatatctgaatacttgttttgactgtgatgagaagattctcttccataatgaacttcgcaatttgaatcacattgatttcctgtcatcaataagtcactttgtaatagtcactataaaaaagtaagtatataaattggtaagtggtataattgtaagtagatgagagattggtaagttgacagaagaaacaaataccttaaaacaaaattatcaatacgaaactcgttataatcagtcagttagaattgatggaatgaaatgcaaatgctgtcctgtttttaatacctttaacattattggtaagaaattttcactattgatactccggaatatgatttataataatcagagaagatttaatgaatttttaaattctattgaagaaataaatcctaaaacattatctattcgtctaaaagaaatggaaaaagatggaatcataaaacgccaaatatatcatgagactcctgttagaatagaatatcacttaactcagaaaggtaaagaattacgacctatattggagcaaatggctttattttctctaaaatattgttgtgatcaaatatttgataatcctgatcctgtcaagattggtaagattactgccagatcatttggaaaatatggtgcataagtatatttttgaaaacggtccttttatgtatacaataccgaatcatccagttactctagtttttcgcaaactgaaaggcagagattagactaagattgattacagaaattaacaaagtatttatttggtcttatccccatttgagattattctaaatattttttctatctcttatcgtctgatactgtcaaccaactcgattatattagtatgtttatagctgattcccttttatattttgttttctaaaacattaaggaatcatgtgaaataacatggggtgtaaaaatatttgtaaaaagtatatggcatcaaaaccatcaaacaaacaatcaagatacgcagaaggacaaaagagatgtagcgtatgcgaaatttatatcaaatgggatggatcatgttgtccgtgttgtggttataaactaagattcagaccaataaatacaagactaagaaggaagattactaggccactctatccaagattataaaaaaattaatccaaaactagtgttgattatgtctaaaatgatcatagattaaataatatatatacaatagttaatggtttttatcgcgtagaactataatttcgcaagaaaattatctttatttaatagtagtatttttagactctaatatggcacatacgaggatttgcaaatatcgctagtttaactgtgagaattaggattattctttaagagaacagtataatcatgattgaccatccgtcgtaatcattattatacctaggaaacccacaaatctttgaatacatttcattctcctgattaataataattccaagtgtgaaatttcatactcgtcccaccgaatcagatacctatttatagtagcgctttattatctaaaaatacattaaaagttgtggcttccagtaagtatggttccatatagcgaaatcgattccctctctgtcctcgtagattatttcccatagttcatcgctagatagtaattcttgtaagaacagttcacaatttttgtaggaagtagtgtttgaatcagaaagccagattctatttgtttttataccttgatcatgttctttgataccaaaactttcggattgtaaaacatatttttctttccataatcccattgcagtacttttaatatagaatgtaggaacgctgtcttccaattttcttacaagttctaaagctgtacttggatctatttctaacaacgtaacaccccattccttatgccatttgaaaaaatctgcacacaaatttctggttttagaattctgccaatctttttcaataagcgacttatcaaggatcattatcctcacactttggaaatctttgattttggttctccgtattaggtttgcatgaagatttaggtatgacgtttttgattgatattcttggaatttacttggtaacagtaaattagtagaatcatattgactagcatcttcaaatagagcatgatatagatttgtggttgattcatctaacaatactatttcttttccgaggtcaattttcttctttaatgataatgcttcagactctaaaaatatgtcaaaagggattaccaattttgaatttatatctactctatcaattaaacctcttttatcctttgggatcgcaatattcccaaaggtaaatgattttccatcttgtttggtgttgcaataattaaaaacatgtattggtttcttatgttttacaaaaaactctcctaaatcctgaaagaatctactattagctattttaaaaccgaatgattcacttgtttcttttttgtagtttttagtaaagaattcgtagacattgctatctaacaatatgtgactatcatcacaaagatcgcataacctcctagcaaacgttggaccatttccccatacaggtatacctagaatagatttcgctgactcaatttctattgctttatttcgtgaaataccaatttttaatccaaaattttgttcctcagaacatggaggaaatttttcatgaatctttaatgccagttgtaaaggtaatagagaatcttctttgaaccaaattattgcaccatcgccagtaaaagatatttgtaacattttttcggaattttccaaaaagtcgtttattacttgaagtaaatctttaatgttgtctacctgtgaatcaacgtctttagatgatccaacgatgtctatacagaaaaaattgtaatattccaccaaatataatattgcatactctatattatttttttaaaaataccagttctaaatcatgaacgcaaatactgacagatgagtatactattctgactaaaaaagaatcatagagcagatgtcccaaagaatgaatgaagacaatgaatataggataaaatatatgagtcagatagtgcattttttggctacaaacctagccattttgcaagcctctgtttaaaagaaatgagaacaattaatgtaaaaaaattattagaattaggtgcaggtcatggtagagattcgatattttttgaatcaaatgtaattcagatagggtcattagattatttaaacgctggagttgattaatactcaataggataacaaaagaaagaatcaaatttttagattaattatacaaattaagaacgatctataacttctaaaaaaaattgacacgtaaaattgatttaagatattatctgcaattgtatcatttttactgaacaatcggatatgcagaaattatgtaataagtagtggattactctcagatctggcgtctttccacataaacttcttagtgactctaaacaataaatttgattcatcattctgcaattttatgccatcttgcaggatgcgaagttcaagtaaaaattgaatttcaaaaagttttttaatatgttcaatgagtaaatgattaccgtagtcaaaaatcgtcttccaattaaggtcttatactctttttgtgtaagaccttactagtattggatgcctctaacatttacccacgagaagagaacctgtttatctaataagtaatctacgaactagattctaacatcccgagaatattattaagaattaccctttcgacagatgatcactttgattaacaaaaatgtcatttcatcgatttaccataatgattcgcacttgctgtcttattagatcatacgtttgcatcttattcaaaaatcattttaaactagtatgaaatttcatactcgtaataccaaactcacataatagaaacttaattctagggagcctatcctagtcaatatttggtattaaaaaccgtttgatacccatgtttatatagtatgttaagtcatttataatatgtcaaagaaaacaggaactaaagaaaactattcaaataataccaatgaacaaattaataacaataacaataatgatttccaagaatccgttaaccaatcactagatgaaaccaaagataatatcaaaaaatcaatagatgaatcaagacaccaaattccacgaattaataatattgtaaatagttatcaagaagaatcactacaaactgcaaaagagatttcagaggattatatcgattctcaaaaacaagtcgttaattcactccaatcagtatggagaccatacaatgaaatctttaatgggttagttaccaccttcttttcccctgatgcagcagctaaagcatattctagatttgtcagcaacgttgcagataatacagtatcggctgttagactttcaaacaacgttattttctcaaccttagaatcatggaaaccagctttaaaacaagcaaaagatatatctagacacatatcaaacacgggagtaaatacagcaagaacatttgaacaaaattcaagccaattagtagaagatgttaaagaagtagccaattcaaacataaactcttctactaaaaataaagactccacacatcattaacaaaaaaatagacaaattcaaaactataaataaaatcaacccatcagttttcctttggagttgaacaaactcaaggaatttttttagtttaccactattgttcagattgcttcttgattgagtaaattaattaactgttgtaatttcatttaagacaccttctaaatactttacatcatctagtgtatttagattacaggatccgaatcacttcatgaattaaaggttgtgcaaacagtatctcattggtgagttgttaattgtcttcgtcatcgtccccatcgtccccatctgcatcatttcctccgctattatctgttatctctcctcctgtcgatttggtaaaatagctaaatgattgttcatcttgccatttaacggtaaagtcatagctggtagcattactcttaatcgcttcgtcaagtatttgtaaagtaaaatcagatctgtctcctgggccgatagtggtagggctggtaccgcctgattcgtgacctacggttctccccccatcatcaaaaaagattgcagatatttctactgatcttgcagtggctgtaccattattcaaaatcacaccaacaatatcgtccgcaaatgctttactattataattttgacttagtaataccatgtcatacttttttttgttttcctgactaaaagcatcagaatgaaaacttccggctaaaaccgatattgttatcagcacaaatgataatccgaaaattccgatatttgaccatgctttcattttaggtcattaataacgagcgtctagaaaaaacttttatggtagatttttctattcaataattctacttgataatcaataaagtaatattaaaaattagcatccataactattcttactaactaactttaccttcataatcgaaattatcacgatgtatttacaaacagggcaatcgattatttagaacatttagagaataaatagagattcaaaatattgttcgcaataatcataattactggatacattatgtaaaataactgtaataactcatgaaacgcatcgtctcggaatgtctaaaatggtagaagatattaaaaaggttatagatatgggtgatccactgccgccaaacgtagtgattggaggtttaaaatgtgttaacatagtggaaggcaaagaagatgaatttgagtcgctctttaaagaattaccagtagaagttagaaaacaggataaaagatgcaattactatgatcttcacaaccctgaacaacctaaaacctacttagttatggaacagtatgaggacaaagaaccaatacaaatgcacccaaaatcagcacacggatggcatattgagtttttctcaaaacattaattatggttataggaatatgcattttaatgatgactcactcatctctactctttaaggtatcgggccagcctaatgctactaacattagtgattatgatgtggaatttgccccgctactttgaaaaacagcagtgttgcgagtgacaatgatacatctctttctgatactaactgacaaaaaaattcttgaaatttatgacggcccaaggattgtctaccagatgctgtgtaaatatcctcaatcatagtcgatatttcctttttccagcagatctatcgttattaaattcagaactttgattatagataccttcatcaaatctctaaggaaggttcagccaatcaaatattatcggaatgtaaaaatggtgtctacactagtgtgaatcttatgaaataagtaaatgcatgctttcatgtaaaaatttaatcccaagtgattaatttgttatatgcaaattcaaaaaacagttcctagaatgtaaaataaaaaaggttaattagttgttttggggatttgcgttagctgttacagttttttgttgcagatgttggatcgttttgatcatccccttcatatatcgcttgaattgtatatactcctggacttagttggacgcctgttccatagtcaccaccattactagtctttacttgcttgtcgggtcgtctattccactaattgtgatgaaagtgttacccattggctctccacaagttttaagctgacctgataaacttacaggaagggtattggtttcaaaacctacagttcctttattaggttacacaccaattgttatagatgttggacattgagcagatacctccttaactggaattgatgaaattgcaagtatagatagaaccaaaattccggttaccgccgtaaatatgattattttgttattactattcttattaaagtgacattaggagcttgaatatttaaggattcttaaaaattagaaactaataaacgactttctttatgagtcttgctcgcttaacgaatctgagaagaagaacatattagggttgagaatcacatgatccaatttgaatcttgcatatatatcaataaaaaagggcggatcgtaagacctaaataggattattggtaaggcaatattttaattgttggtatcaataatagttgttcgtgttctatgagcagaaagtgatatctcaaagcggaaaactaaaaccttattcaagacctagttgcaaagataaaaccaaatctgtttcacataccaccgaacccacttagaatacacaccaatatatatgaaatggactatagtatccatacaatttgcaaatcgttgaatcgactccttatccaaattttacctatgcttcttattccttcacccattcctatttccaatgccacataagaaataccattcccattcttgtccactatgtctttatagatcctactgaattgctcaaaaaggagagttcacccgtagcaccatcatcgaaaattaccgctcctatgctaccaaaactaccatctggatgatagatgccaattgcataaaagtcatacgctgctataccattatcatcagtagcatactgtgcttttccttgaatataggatgtagcattgtttctgaatgtctcagtagaattccactctgcagttatgtttactgtaccattaattgttccctcacctgtaaaacttgagaaaatagtattgtttgttattcctggtttccctggctctgtttgataatgttcaacatgaaatggaactccaaaatctacatcttgagaaaggttcgtgttatcaagggcttgagtgtattgcgtgacagtgaccattgaagaaaaaagtacaaatccaataattaatgtgaaagtattagtggttttgattctgaatttcataacaatctccttggtataatgaggttaataagttgcatcgtatttcaagaacgttgacaataatttggattataacttgctaaatttgcctactatgtggtttgaggatgtcctttgacaaaaactttattctttgttctattgttaactaaaccattcctattgtaacaatttagaatcggtttaacaagataagatagtttttcagaaacttacaagcaatcaaatttcattcacggatgagctacattttataagatttttcttatgcttcaaaattaagtcaaatttgttttccataccactgattcctcagagtatatgggtctctatatgagtaattcactagttcatttctaaaaaaagattaaggggaaaaggcaaaaaaaccgtgatgaattagatggtttaattatcttgctttactgccttcaataacgccgatcacgttaaatttggggtaatgagtttgaatatgtctccatccggattggtttaaaattgattcatactcttcaatcgttctttctcttccagtagtagcacacatcatatgtatatcaaataatttggaaaaatgcggtgtatttgggtctggtactatatgttcaacaattaatatcttggagttgtcagttgcagatttgtgaatatttgaaagtatttttatacactcatcatcattccaatcatgaagaatcaatttcattatatataaatctgcagaggggacttgttcaaacatatttcctttaatatatttacagcgttcctgcaaacccaatttatttggccataatgaatcttgattgttgactaccggctccaattctaaaatctttccattgaggtgattatattttgatagcaagtgacttaaaagatgtccttgaccaccaccaatttcacaaatatgtgaaatattagaaaaatcgtatccatttagtgcctctaatacaatggcggtatgcattgatgaataactactcattgcgttattgaaaactttagaatattctgaatttttggcagcatattcaaaaatattatttccatattctgaactaaatgcattttgttgtccatctttaatcattcttggcaaatgcttccatatttgataatgttctgacccctcctctagaagcaaaactccttgaagagtttgaggatggtcttttcttaacaattctcctaaagtggtgattgagaatcttcggccgtcctcctcttctttcaaaaaacccaaagatgctattgatcttagaatacgataagccattggctcattcagattcaaatcctgtgcaatttgacctatttcgttaggacttgttgttaggtaatcaaatatacctatcttggcaccagcatatagtatttgacttttccatctaccaaatatgatatccatagttttatcaatttcagacatatgcttattctatcaaactttttattatatgttaatcaaaaataatgaatttcatctaaactgggttattgcaattctaaatcattttttcatatctttaagctgtacacagaaaaagtgccttttgatactgttgcaaaacttatcatattattgttttttattttgatgttcttaagatacctggaataatccattaaacttatattgatatgtgggtatccctatgatttctgccgaacacctataccatacggaacttaatcccaccgacccggtaattatgtagttctcatggtgggtggtggacctaaaacaagagaggtaattatttagacgttattttcatgttatctaaaaaaattcaattcaaccaattgatgaatacgtatgtgataatattgtaactgtcgctaatccaaaaaaactgtatgcaaatcctcattcaatggatctaaagtttccatgtctttttgattgatatgaaaatcaaataccttgctgttttctaaaattctttcttcatgactagattttggaataacaatcagattgtgttgtaaactccaacgcacaagtatttgtgcagggctcttgtcataccttattgccatttttaccaagtcatgatggttaagtcttttacttcttgtgagtggactatatgcttcaagctgaattgcattactcttgcagaattgtaatagatctttctggtataagaatgggtgaaattccacctgattaatagcaggtacaatatcagagttttgtatcgtttctttgagttcattaatagaatagttgcttactccaatcgcacggacttttccattatttagtaattggatcatagccttccatgtttcaataatttttttctggactggccaatgtataagataaagatccacataagataaaccaagacgtttcaggctagcttcaaatgctcttaaagttgaatcgtatccttgatcactattccagacttttgtggtgataaagatgtcttctctttttatgtcactgactttcaaagccttacccacatcagattcattaccaaaaatcttggcggtgtcaatgtgtctatatccaatttttagggcatatttgactgcattggtggtttttcccccaggaggtgtttgatagactccaagtccaagccgtggaatttgaattccgttatttaaataagcagtggaattcaaggtatatgacatacaaaaagtaatcttgaatctgacttaactctatctttctatctatctatctatgacagtaaaccatcaaaacaatattttacttcaaacattacaaattggtaaaatatgatttccaccgaaccctcataccataccatacacttgattgtaaccaaacattaatgtccgcgacttaggagatagagttgcaaattcgatcaaatttgtttcacattccaccgaaccagttacatatttatagtttagtaacaatttagtattactcgcctatgaagaattgtcccttatattgaagatgtagaaaaatactttttcttgtcaatccttagtagtattaatagtgtaacaacttatagattctagtggattatgtctttgcgtacagtcgaaatcatctggcttgttaccaatttgactggagataacttcatacccattcaagtctaaaaatcttggtgaaacagtggtttcaatgaatatgacgcggttatatggtaaagatgcctcagtagtctctcccatctgaccttcacctattgtgacatctcctctaagtatgttagctcctgcagctcccaaatacgaccctgcgtgaccattacacccatgatcagtagcacgaccaggttcacttctagggcagataatgaattgtattattaattttatttttactttgtcttcatttgtatgagttccatctaagccatcaatagtacgtatatcgccagaaacactagatgtagtctttgaattaatctggctatcacactgtgcattattctccgatagtgtagcagtagcatctcctgacattatctgattatcttgtccagatgattgagattattcggttgcttgctctgaatcgctatcaacactttctgataacacgctattcttagcacttgcgctaaagagaggagaattgaatgttactactacaattaataagagaaggaatatgaacatgagcggtaaactcaactgttttattgacatattaattcaatattaatagatcatattacaatggctattaattgtacttttaaatattactgtgtcaatatcattgatttttgagaatgataatgttgatatgctaaatattggactattcttagattatcaacaaaatcaaaagaatgatataaacaaggtgggatgcactcaaactcgtgtggaaatcctcatgaattccacataactagctctatatattagtaaccataaatacaatgatagtctaacccggattgaaaatcatgaattattcaatcgaattatttcgatagcgtcaattggttccttatggtttatttttattcttttttgtttcttggatattgaaatatacctagcaggtataatactttccaaatgttcttaatataatataccatcgtgttgatggggatcatgaatatatagttgcatggttaatgaagaaacataaaattgagaaaaataataataccaataacatttcttgcaattttgatgctaggctttaatgaattagatgtgagtgctcaagaaagcaattttaccatattcttaaatcctggtgcaacaaatagcgacagccagaatcctatgtcacctgtcaatgttactattcctgcagggaccaatgttacttggataaataaagactcttctcctcacatgttagtctctggaaccccaaatgaaggtccagataacatattctatggtgatttctttggtacagatgagaattacactgtaacatttgatgaaccaggcttgtattcatactatgatccaatttggagtcatatcagaggagaggtaactgttgagaatcccgtatttcctgccgatctgggatcgagtacgaattactcaagtatgaatggtatggatgataaccctgtgctaaattctaatacacctgacgtaattgattcaaatacaaataatttaaacacatcaaagaacgattctttgtcaatcccatactcgtcttttttatcgtcagttcctagctttaccactaacgatacaagtgaccaaacttctccgttatcatcactaggttcggatcaggcccttacaaacatattcaataaggtcggtccactgctcggccttttgatgaatggcaatagcagttcctcttcttcacccttctcctctctgtcccaatcaaacgaatcttttggtgtcggtacgctgaataatcaatcctcatttacgtcatccaccactcaaacgtcaagtcccgatcaggcccttacaaacatattcaataaggtcggtccactgctcggccttttgatgaatggcaatagcagttcctcttcttcacccttctcctctctgtcccaatcaaacgaatcttttggtgtcggtacgctgaataatcaatcctcatttccgtcatccaccactcaaacgtcaagtcccgatcaggcccttacaaacatattcaataaggtcggtccactgctcggccttttgatgaatggcaatagcagttcctcttcttcacccttctcctctctgtcccaatcaaatgagatgtttggagaaaacttgatggatactgctaatattagtaacggtgaaccttaagatgaattattatcatatgaaacttccatccctcctctcagggacactttttctgtacaagacaatctatcacttcatcagataaaagaagggtaaaagttcgggaagaattgatgattgccttaaaagatcctaccgtatagtagctgaaataccagaactccctacatttttagatgatgaaggatatcatattcagatgctacatttaaggtgggctcagagaaatacatatctttaaggctgattttggatcattactatagggtaattattgcaacggtttgatataatatgtcaacccatctttatttcatatttaacagacatgtcaataagaaattactcggatgaatttatcataataagatcatcatagaacagatttgaatttatcttctatattttcaaaagaatattcataactaccgattgtggaaagtttaaacaacaaattatatcatattgggaatatcagacaaagatacctataaaacttaacgaatgtgttgaaaaggaaattaagcctaaagggacgatatctaaataattaaaaaagatatattagaatttattataaatacaataaacaaaacattaatacattaaaattcgatgaataataagataagtttgtatattaagacccttgttatggtagttcttgtcatgtttggagtgcttgtcattttctcttctaatatttttcccataagtgccgactatacgaaaatatccgaaaagctaataacaactccaacacaagaccagtctacagcagataatggaaagaaactgaaaatagcttttctaacagatggcttatttagtgatgcagggtggggggcattcggatacaacgcagcacaggcattacagggaaaatattcctatatagtcgaacttaaagaaaacgtgcctattccaaaaatagaagatacattaagagattatgccaaggcaggttatgacttaataatatctcatggctttgagtggggaaagccggcagttaatgtaggtaaggattatcccgaagcgaagtttgtaatttttacaggacttgttaattctagtaatgtggcttcaatctatccgatgcaacaagaaggaacttatatgttaggagcacttgcagcaactatgtccaaaacaggcactattggttttgtaggtggagaaagataccctaatctgatcaatatttatgaaggatatagacaaggcgctcaggatgttaatcctagcgtaaagatactcgtcacatatttagacgattgggataattccacaaaaggaaaaaaagcagccatttctcaaatagatcgtggcgcagactttctattacatgtggctgatacctctggccaaggtgttattgaagctgctaaagaaagaggaatatacgcctttggtgcaatctctgaccagaataagttagctcctgatacagtacttacatcctttgtattagatgccgaaaaggcatttgatcaagttattaaattagtaaaaacaggtaatttcagtgggcaaatatttaagccagggctagaatcagaaaagggctcatctggggagggaatcgtgtatatagcaccatttcataacctcgatcagaatgttccagaaaacgtaaagctatggtttgaacagttaaaagaagatattgtcaacggaaaaatcaaaataccagaaagatattccggtaacattggaaactaccttgctaataacacaggttaaaatctttgacgaatatctttttttaatccttctaaaagtattgaaatagtgaagcaaattgggaaagcgttttctatttctcagaagaaaagaaatgaccattgtttcaataatactattaattgctggatcttattctttattattcttccaacaaaatattgcagaacagaatattagagacagtcttttccaagctcataggaataatcagatagaggttacaaagggtctttcagagcatgttagtgccgatcttcgattggtagcatcgattctccaaggattatccgattctatttatttgcaacaaggagaattgtatggcgatagggttggaaacctaatagaagaacgatttaatgaaataaacaacattagtaaaatcgatgggctttttatcgcagacaaaaataatataataacgcataataaggtatcagaaggacaaaggagttttgtcaatatagatatttcacttagagattacgtaaatgaaacaaagaggactttaaatcccgtatattcaaatggcttcaaaggaattgatggcactcataaaatagcattaacttctcctataataaatagagataccgaagaatacctcggaatggtaggagtggaaataccatctgttgatttctttgcacgatacggaaatgtatataacattagctcacaatttttggtagcgtatgatcgaaattcaaattatatatccactcctagaaccaactttttagggacaagcttatttagtgatgaagttcagcgttttttcaattttaactctatccaaaacaaatattatcatggtgtttttgatggtcgactatttggaggatatgccatatatgattttggaactggagaaagacttaatactggatatcctgtttctattgatggaaactccaaatatttcgttttcctaattacgcctacagcatcggtttactctgatattgatgagactttatctgcagaaagatcaaagttttatttgttgattgcggggattactactacaattgtaattttggttttatttttagtaaaactgaatagtatattgaatggacaagttaagagaagaacaaaagatttagaggaatcaaacaaacgccttaaaattgctaatgaaaaacttaatatccatgacaaaatgcaaaaggactttatcaatatagcagcccatgaactaagaaccccaactcaggcgatatcaggaaatttggaattgatcaaaatgacttatgttccttctattttccaaacgtccccgccagataaaataggcattaaaggtgaattagagagactggtcaaagatgaagataggctacatgattttacatatacacttgtatcaacacatagaaatgcacaaagactagagaaactggtgaatgatattttagatactgcacgaattgagggtaatcgtcttgagttgcataaagaatccttcaatttaaacgaaaaaatacagaatgtaattaaagatattcacaataagactaatcttagttcacattatggtaattcctatacttcttttaacatagtttttgaaccgcatgaagatcccatcatggtatctgcagataaaataaggattttcgaagttctttcaaacgtgataaataatgcgataaaattttcaaatggtgaacccatcactatttcagcgaaaaattttcaaaaaaatgaaattgtagagaagataagtaatcataataatgaagtagtcgacaccgaaaatacaagggaaaatgaagatgaaaaggtggtggtggtatcagttagggatagaggaacaggtatagactctgatattctaccaaggttatttacaaagtttgctacaaaatcagatcaaggtacaggactaggactgtatatagcaaaaagtattattgacgctcatggtgggattatatgggctgaaaataacaaagatggaaaaggggctacgttttatttcacattgccattaactaaataatcataggatacattatagccaattttctatgcctatcgttttctctttattcattaaatgcattatggaaactaaataaacaaacccatttgaatatcctcatgatttccaccgaacacgctactaatattagtaacgacaaaggtaggtataagatatagggcaatacttaattttcacctttttaaaacaaatctttttgtgttttcatcttcacaattgagatgggaaaaacgaccattgactattctgagagtaaaggtcagataaacgatcttttggatcctgttattttatattcttttttgcgcaggaatcacagtatttttctatcatggtagctccctctacagtgaatattgcttcctgagtagctgtattaccgcaacttacacagtattttgtctttccgctaacatcaacgtatgcccttatcgacgaaaaattcttttccattctatgtctctattttattattatgcaattgcacttatagtatctgtttgctagatgtgagccaaatttatataaaaaactattagcagatgaatgttttatgctcattggtgaatttaatttattttttctgcagtagttttttgtataaaaacagaggacaagttaattagagcatccaaagaatttagaaaatccattcctagacttaaaggatctttacaggttactagatcatcatttgatctatttccttcacttttgaattaaatcactaattgcccgcattaaaatagagaacgcatatatttatggtagttaatcatagtcgaaacgtcagaatccttataccatacgtaacttaatccccatagaagcctatgaatttttctttatatattagaaagaaaattgggttaatcgtttgactaatcactggatatcaattaaaggataaatagaagatggtaattgttttaataatttgttatacatattgttaagttatgtatgaaaaacatacgataaaatgttcgtcgtgtggtaaattatttacatcaaaagaagatgagactgtctgtgataagtgttccaaagagcttgagaatataaaataatttctactttaatctagctttgtaaaatgatagttaatgaaactctatagccacgtttactaccatgtaactgttttaattaggttaaagtcaatcacaatcggatcgagatattggaggagagtatatacaggaaatgatgacaataacttttagagcatgatatttactcaaagtagcgtcaaaatttattcatcttttgtcttcgtattttttttcctattcttggcactaaatttcatttatacagaatcaaatcaatatatagtaaagaatattgtttttgcccaaactcttgataacctaacactatctactatgattaatcaaggctctccttattatggaaatcttagctctccattagtggtcatagattttagcgattttcaatgtcatctatgtaaaagatatgtagataatacagaacaacaaatcaattcttcctatgtccaaccagacaaagcaatctatgtatttaaacatcttccaaatagaggatttgattcgaaaaacgcttcattagcagcacaatgtacaaatgaccaaggacaattctgggagtttcataagattttgtatgcaaatcaaggtccaatagattccggttggatcaatactgaaaacttgaagaaatttgcttcacagttatctgatatcaatattactgagtttaactcatgttttgatactaaaaaatatgaatcattcatagacaaagatattgccttggcaaattcgttaggatttacagaaactccatctttcataataatgaacagcgaaggttccattatcgaaaaaattcagggtccaaagccatttccaatatttaagacagttattgataacctggaaaacaagataactaagaattagatgtccggattttttgcattcaaagtagtatacggttcaaatccaattttgtatataggattaaccattctggtatttactgtcttttggattttttttaatgcatttgatgagctgctatatttttcaccaatcctttatttttatctaccaaaagacgctatagtcggatttcttttatctactattagtgcactgcttctgggagttcttgtttcaatgaatatttacctattgagaaattcgagtattagatttaataaatcgttaatttcgagttcattttttacaatattatctagtgcttgcgtcagctgttcttcaattggatttgtaatcatctctacatttgggagcgcagggataattgctactacctttcttacaaattatcagattccactaagattgcttgcaattggtgttttgattttagctctatatactgtttatcgcaaaattacaaacagttgttcattaaataattaataatatgaaaattcatgatgaaagtaatcgtttagtttaggtgtatcccaaataggaaatatgtagtaagtctataaactaaaataataaatatcgctcaacgagaagatgctgataaaatgtagatggatcccttattctgtttaaaattaccgtagatcctgaaagtattgactatcactttggtaaatctcctttaatatttgttgttagtggcaacccagaattcacaagagatccacatattatacagttattattttgatttgacataccatttttattaattatctttgattaagaaattttttcacgtataatgacataataattatcaaccagatttacggaagggtttacgaatgaaatttgtaattatatgaaataataaagttgtggtagtggcggtggcggtggctagtttacaattacttttcctgtcatagtgggatgtaatttgcaatgataatcaaaagtacccgattgatcgaacatgtattcaaaagtttcatctggtctgagatcgtcggaactaaaaatatcgttattttctgttactgtatgaacaccaaagtcggtattatccatgtgactgtatcaccttggcttatagttataggattttgattttatgctttatctcctagtgtagaagcattcgaaactattgatacttccctatttgattgtgcgtaggcacctggaattatagaagatgactaatgccaacgcagtcaatattaatacgaaacatttccgttacagttaaaattcaatctgttatatttcctttagttattttctgttttgagaatgatgtattcttaatccttgaaatagtatgaatataatatcaatatgtcacactggttctgcatgaattattactcgagatgctccagtgttttttgcttaatggatatataatgacctcatctttgattgaaccaggggcattttcctctaaaactttatctacattatcgtttagtcccctttatgtgattctattcttgttatcaatgatccaattaattgagtcatgcagctttaatagcttcatttgagacttctctgaatcacaataataccttcggatgaactaatccgatccatatctgcctcgggatcataatctatcgcgccagtatcatattcagtatagttaaactttgatattacgttggactatctaggcctttgtttggtcgacatacgatatcctacaaatttacaggaaatccacaatctgttttatccattaaattacgaaaagttggtacacgcctcatcttacaatctttcatatcctttaattcaggttattgtcaaacgtttagtacccttcttgttctaatagtatttggaatccaattattcaactgggatcgatattgatgtcactctgttttagtcattacctgaatttatctcaattgacaaagtgttatcatatatatcaaattccatacacacaagtggctctcacttcacagtgaaatatttcttgttttaatgtgagggtactaactcttgttctcttcctggtatttcccaatactccgttcataattcgactgtacttgagtattttgtattcatggtcaaaatatgacaaaataacacaaccattaaataccaattactataaataagtattagtaatatgagacagattaaaaaagcctactttattcataaacagaacaatgtaggatttgaactcaaaaggaattatctggaaagatcaaaacaaggtggatttaattaaatgattcaaaaaataagatcctccattaatacctatggattattatccgctttttccatctcgatgtttgtactggtaatgtttgcatttgatcattcaaattatactacagtattttttattccgaacgcatatgctatcaataatactgaggcaataggtggtctggccacaactgttgatttaggtagtccattttttgttcagatctattcgcatgatcctgcgccgccaaaatcggaatctgaaccaaatctttacgtaaaccatacaaatgatggaattatcaatggaaacttgagcgtcgttcatgtgggaaacgacactgagactctcagaaataataacacggtccatctccaaggtaactatagtctaacgtctcataatggtatggatacggcaagttataatttccaaggaataggtacctatggtccaaacgacacgtacgaaagtaagggcgtggcaatttttgatgaagtcgctactggagaactatcatccctagcgaattcaattgccgtctataaggtcaaggttgatgcaaacgataacggggcatttcttatgtggcactggaagtaaatatatggcactgaaaaactatataattagaattacaagtctttgcgtaaatggcacataagagcagcaaaatttttcgatttagtttaaccaattggagtactgaacctggaaacctcaactattataggagtaaataatacggatagtagctgcctttcctcatagaattgtaaaagccagcacacttgtgactgacacttcacagtgaaatatttcttgttttaatgtccagatcctaatacttgtaataattctgggatttgcagaaattctgttcataattcccaagttatactatctttatattaaataacgatagaagattaaaattaaaaaactgaaggctttcttgataactttgatgattgcatctatcgaaacgaagtcgcagtgtaaatttcattaatctgcaatatggtattagtttattctattccgatgattttataaatcatataattacattttctaatggttagtatctacatagatagttaaatgcatcaatacatgaatgtattattcattttttaatattttttggttaggtcgtacatattatggcaaatatatgaggtcaaaaccaaaaagtatagcaagcaataaatagcaatcgaaagaaacgagcatcactgatgatacagaataataactattacttttttaataaacagtacagtttaagaattgaacataaaagaaatcatttagaaagatcaaaatacttggtgggatttaattaaatggtaagcaaaataaggtcctctattaataaccgtggctttgcatacactttttccatctcaattattgctttaatgctgatttctatgtttgcgtttgatcattcaaactataatgctttagcccaaaatcaatccttgcctttttctgatatttataccaaacaagatttagcaaaaataaatgataaggatcatttggctgggatgaacttttcaaagcccgtagacgtatacagcaaagacggtgttttgaaaactacactcgttgcagattacaagataggtaaagtggacaacaagacaaccactggaatggtatacaatggttctctcgtggggcctgctttccatgtctatcctggagacagagtggagattaacttggtaaacaatctcaatgagtctaccaacctccatttccatggacttcatgtgtctcctggaaatacttctgataatatatttctgaatgttgagccaggtaagacactgcattatgttctagatattccaaaagatcacgacccaggcacgaattggtatcattcacatttgcatatgctttcttatggacaagtttcggcaggtctgtctggcttgtttattattgaaggtttagaaaagttattgccagagccattacaaaatatcactacacaggccattgccatgaaggattttccatttgacaatctattcgttactacacataatttgagtaacaccatgacaggccatgaaagcctaaccgttaacggagaagtcaacccgactatcaacattacatctggagagactcagttatggcgacttgccaacatcggatctgagaatgaatatacacttacactccctggcaatacattcaatgtaataacagaagatggaagcccggtttgggaggtatggaataatgaatctcttttctttccttctggaaaacggtttgatgtattggtgactgccaacgggagtgggtctattccactaggagttcctgctaacccctttactgcaccatacgattggaatgttgcgactgtaaatatacaaggcaaccaaaccaatgaaaaacctgcagatatccttccaacaagcttaattccaaacagagacctgagtaatgcgaacataactaatcaccgagtccttaatttctcatcaaatgatagagattggatctacgagataaataatacgacctttgatcctaacagagtagatataacagcgaagcttggaactgtagaggagtggaagttagtaaaccttgataaaatctcatctggcaatattcatccatttcatatccatgtaaatgactttcaggtaatgtcagttaacggaataccatatgacgctcacggataccaagatacagttattattccgactgaaggtgaagtggtcattaggataccgtttgatgattttgtaggaaaagccgtttatcactgccacttgatgttccatggggactttggcatgatgggtatctttgaggtcgttaaataggtgttgatatgatttggagattagtgaaatgtttaatacaaatatatccctaaaaggaaaagcagtggctttgttcgttgtgctagcctttaccgtagccggactcacagcagtaacatatctttcaaattcgtctgtggtagcacaaagctccggaaatctttcaaattcgtctgtggtagcggaattatctggcttgagtaaacatccgcatttaactccagggaatgtttcagatctgtctgtggtaacacaaagcaccggaaacgacccgaatgattgtttcaggacaaatgataacatagatacttgtcctatgcactcacatttcaaaggccttagtagcaccacatcggattgtttcaagatagttggagaagcaaaggtaagcaccggcgatacccaaaactacacaaaaagtgtacagagctttttctccttactatctgagaacaacaaactaacatcaataaatgagaatatagcgggaggcagcggtccaataactaatatgaagggcatatgggatttaatggaaaatgaggtcatgactcgaaacgacagacaattggtattggacgaaattaatatcgtcttggcagccgcccaacccgggtttacccaagcacaacaggatgcactaagtttctgtttcgcagatgaaaccactgctttgggccctggacttaactattagatccatattttttttctttggataagacaatagtctgcaattttcccctattcatctatttatttttattgaagcacttgacactcaaagagaatgaccactgaacctgaatcccaaccatcaggatcttatagttccatgtcatttttgccgcgtagccactcgattcgcaattgaatactgcagtcaatatcttgcccaataaaaatctgaagagatatatttaatacaaaaactcttaaaacttttcaaaaatttattatagactcaagtgaaatttcctactcgtcacaccaaacgcttataccatacggaacttgatccctataaatcaactcttcattttggtaacgatatcgagtagaagtcaagccaaaaaccctatcctaaattcttcattttcacatccaagaaacaacgtatacagtatcacaaatagtaatcaagttaaagacatctaatactctgattccgtaatatatgtcctattaagtcatataatcaaattttagactctaacacggaccttataatatttgaataaaacataagcaaaactatgtctcaggctaccaagtatcaaaaattcatgggcttttcatacaataaaatgataaataaagtccatagtaatttttgttttgggcttattatttgctagataatacacctatcatattactttgtcttggctattcacagaagatgatcattaaacatgacaaagagtttatcaataatatcgatgtagaattggagaaatgaaaacatgtgaaatttgtggcggtacagtatcatctggaactaccaccactatatgttcatcttgtaccagtattaaagaatctacaacggcttcaagaggttctcttgaagatcatatatgtggttgtatcaatacagacagaagaaattgtccatggtgcaagaaaccgtgccatcatgatacatccttaaaccctaagatattaatttcaccaatgtgatatctaccccacaactacttcagtcatattaagaaatggtgttaaactagaaaatacctgcataattcttaaggattggatttgagatgtattaggtatggtcatcgttcaaaaacatttacctttaccttcattctaatacgacatcaactaatcctccgtatgtactttacccattttttcttaatagttgaaatgcaagcaattttggggttgttcccaccgaaacagcttactaacatggtctcatggtaagaatggttttatgaattattcaaccaataatataatgaaatgatacccagaaaaacgcaattgattgcaattgattacaacacaaacgtggacattattagcccagattttcaatcattattatgaattttcaaaacatcaattcacaacaatatactgatcatatgccgaaactaacatcgatattttcaattctttttgtttccatgtttattatgacaatcattttgacaggtgataaagggggcgtaaatgagaaatcaataccaagaccgcaattaccaacttctgaatcatcttcgacaatcggagatgatttcgaatcaaaagatcttacgatcccgtcacataaatatttggatgaatctaaaatcacaaagcagtcaggaacgagttatttcatatcaaactatattaatgcgtggaaattaggtaaagcaaattcggcaatccaaatgattgtataaaatgaataatacgtctctttcaatagtagttatacacatcatggcggtacaaactaggtaaccattgtcatcaaaccgatgttatatcctgatgattttaaccgaacccgacgactatacgggttattctttaatatattcgtcataaaaatatggatctttatgattttcagctctattcaattcagcatttctaactccttgctatgatggtggataaatagtttcagcaaattctttgaatgattaagtttgcagtttttcaacccataaggatagtaggcatcaaaactctcggttttgtccttgatataccacatcgtcctttcgagatgcttttctggtaacaggcatgattgtgattggatatttgatatttgttttagttgtcatcattaccacgataatgaaaacaaatgacatagtgctatgaaaatgaatgcatctataactagcagggaagaatagtaatagtataatatacctaactacaattttcaatggatatatgatttgataatccatacattataagtttacttagttcatagtctctagtctcaaaagtatggttaccatgaagcatatcatcgattaggattattatataattcctaatttgacaaagaaataatcagaacaagaacatatcaaaattatcaagatttgatgatacaatatctatttttttctaatcaagtcgttcacttcctttaaatccgtacatagaggttatttaaccttaaatattctgatagactctaaagttcaaaggatctagtaattaaactaaatagagcggattttgaacctgaattatccaatgtgtcatctaaagcatttacccgtaaaataaaattaaccactttatcatatttcgtcaactgtatttgctttttgtgttaacgctgatggttttaacaatagacctcacagatcttgtcttaaaccttaaagaacctagctaactgaaaagttatatgaattgattctccaatgagaaagttacattcttagtttctttatgctccctcttgtatgggtgtcttatcacaagggattcaattataaaaaatcgacattatcacaagaaattaattcatacaagaaagatgaatcggtttgcacttacaatattgtttgtttatccacaaaagtttgctagaccctttatctttatggacaaagaaaaataaagtatttttaacatctaattgagcagataggttatctgcacactgacagaaacctcttgttgtcctggaattataggagttgaggaagctccagaagcaaatgatctttgcataaattgatcgctaaaaggcatggggttgaatccatctgtattaactgatattgatttgatacctacgattgtagaccctattgccgatgaggctatatctgcattttgtttggcgttgctaatagcttgttgtattagtgtatttttgaccttgtctaacgatttgtcagaaactttaaaatccaccccattgatggtattggctcctgcagttacagcagaatcaatccatgatgaaatattatcaaagttcggactttgaactgtcacgatgttagacactgtgaacccagtttttaccatatttcctgtttcagtaaaattgaaattaggttgaatactatattgagaagtactgatctcattttctttgacgccattatctcttaaactagcgattatttcgtttgctattttcgagtttgatgttactgcatcagtgacagattcatttgtagattgtactccaatcgagatagttaccaaatcggtatttactttttccgttgcagaacctgacacaaataaagtattattgagagatgctgtttgagttttattgacttggttagaatccgtgacttgggcaaatgcctcaataggctccatgtacataacaataagagatacgaatcccaatcccaaaaataataagattgtaagattactcatattttgtttaaaatttttttcataataatttgacatcgatttattagaacctactccaatatataagaagaccctattttttaaggctagacgagtctataatgaattctgaaatcttctttttattgataaattttcttgtgggttgtgcttttgaatccactttcaactcgcgccgtggcgcttcttttgactttgtttaagaatgacattgttttgacaacgtttctagtcgacaaaccaggatagaagaaataaagactaaattccaaatctaatagaaatgtcttgcttcttttaaaaatcatattagagattgagccctttcaaggtatagttttgtcgttaaattattagagccactaaacacatcatattaaattatttgttttcaaaaaactggacttggcttaggctttgtctaaaatttacttttagatccaatactttctacattcatgttatcagtaaagaagatctgaagaattactaggatccttaagtaaatcatctttgtcgttattagtaaagtcaccagatcctaaattatcaggagtaaggttcttaaacaagttgtatatctccttaggagtaatcatgtaatatacttttgagtcgtttatattcacatcaacagcagctcccagatgcattataaacatagaataaatggtgagagattttatcaaatttgacttaatcaactggagtataacttatgtatgtcaaaggataaaaggttatcttgagtttttgcattaacatcaatacttttgtctctagaagccattattcctgcaataacattctagacaaaagccggaaatgcgacgaactgattatccacgaatgcgaggatcaaattaggagccccaagaaaagtataccaatactgtttcaaactcaaagtatcaatatcaatcctctacaagttcatcctacgatgacgtcggatccccatcaggaaatattttaagatacaaccttcaagtagctagaaataagatgaaagttataaaagtagccatttccttattgcaatgttgaaagattgaatacaacaagtcactttcaaagggctttgatatttcagggaggcggatctttaggagcttatgaggctggcgtttacaaggctacttatgaattgctttctgagagggatgtaaaactgggtaggaaaggaaaaccgatatttcatattgtagctggtacctctataggcgcaatgaatgcagccgtactagtcagttatataaaagagaacaagagctggcaaggatctgcggatcggctgattgaattctgggaatatatggctacggaatcctttatggatgcaattccaagttttaatgaatggtggaattattggcaatattttaataaagatttggcgtcaagcgaatcggcgagaagatattatgacactaaacaattcatgcttagaggagtaccaaatgtatttaccctgtccaacatgttggaagataggaggtttttggatcctgtcaatactcagtatctttatagtaacgaaccgctcagaaagagtcttgagaaatttgcaaagtttccgatagcgaccagttaccaaaataacgaacctcggctccttctggtgagcgtcgacgtacaggaaggaagcactgtagtatttgatagttacgaaaaggaggatggcactcggaaaactgaatatggtcgttacggtcctgaatatgtaaggggacccaatgaccatggaggatatgagtttgtaataagtcataatgaagggatagaagttgactttgttcttgcaagtggttcagtaccagttaactacgaatataccaaattacaggtcgaagataccaatggtagtaatcgaattaaaagcggaatcgaacagcagaaagaagaggtaaatagtcctactactaagaaagttcggtatttttgggatggtggcattatagcaaatactccacttagagaggccgttattgaacaccgcaggtattgggcttccattagaaaatctgaagtacctcctctacgcgttttcatagtcaatgtacatccaattaaacaagactccttacctactgatcatgactctctcgtggacagaaaaaatgacttgacgtatcatgataggaccttatttgatgaaaggatggcgttactgatgaccgactatgttaacatcactaatagcctcattaagctagccgaagaaaacaatgttaaaaggtccttaatagatgacattctaaagcggcaggccgatactagaaattttagcactgggaagcacttaaaatacgcggatctggttgaacatatggtttctgtagaacaggtaattagaatagaacgcaagaacgacacacatactatatcgaataagacttttgatttctcaagcaacacagttagaaatctaataagagatggttataaagaaacattagagcaagaaactaaaatactacaagtgtgggattcggagcacccaaaataatataatattaacagttgcgtatctattacgattataatgcaatgacttttccagttaatctcttattcttaattgctctttccttttcttaaattcattaagatatctctggcaagagcaaagggtataggtagattgtaaataccgaaatcataatgattccaacaatggtgagtacaattccattcttgatcatctctttgacctgtattttgccttgttcataaactagtgcattaggaggagtccccattggtaggaggaatgcgagggaactagataatgtgatagcagcaagaaacggtaatgggggccattgatttaatgcagccatgcttgcaacaacgggtatgaatatagctgccgttgctgtatttgacatagtattacctataatcattgttatagaaacaataacaattactattactgggaagggcagaatgcttaatactgataatttggtccccagatagtcagcaaggccagatgttgtaaacgctaatgacagggaaattcctgcacccaggataaataagacaccaagtgggactttttgcacatctgaccagttcagaaatttttcagttctattttttggtatcacaaataatgttacacccccaaaaattgcaataactgcagtttcaagatatgaatcatcaccagcccaatatggagccgcgaacattaagattaagactgatagcaaaattattaatgagaccttctgctcccttgtgatttttcctaatctttctttttcagcgataattatcttcttaatgagggattcatccatttgctcctttcttacttgagctgtgaaatataaaatagatatcatcaacattgtaattgccagtggagcagctaccgaagtccaagtaccaaatgtgatagttttgccgaataactcgtttacaatttctgcatagattagattaggaggggatgcaataagggttgtaatactcccaattgaagaggagaatgcaaccccaagtaaaaggctaactttaaactttttactaaatttaataccgttatcagataacagggatagagtagcgaaaaccattggaataatcaaaatagctaccgtagtgctcataataaccgtggaaattaaagccgtacagatcataaaaccaagtattattctcttggatgaatatccgaaaatgttaatgattcctaacgcaatttttcgttgtaacccggatttttcaactgcgagaacaaccagaaacatccccaatagaagaataattattgggctcatgtattctgctcctacgactcgtagtggtaagacacctgttataggaaacagagctagaggtaatagagcagttgcatagatactaacagcttcggtgacccaccacacgacaagccaaagtgttataccagcaactagtttaccttgatctggtaaaccttctggggcaggaataacaagaaggatgaaaaacaaaactggacctaaaatgagtccaattaacttagttttgcttacttttgcagatggggaggaaaggctgttctgcatccatgctagcattatttgacagtaatataagtgaataatgtgtatcagaaacaaacaatggcaaagaccaaactgactcgcttaatagctggcgttagtgaaagaaacataatgcaaatgaatatttgaactgtgataaatatttagcttgaaattttcaaagccacaacttccagacgattctaccgatgacagttttgaggatataagcagattagtgcatacaaatagtccatcttcagtatcgtattactcatctttattcaaaggtttttgggaacaggcaaaactctacgaaaggacaaaagaagaactggacaccaccaaagacgaattgacaaagatgaaggactatatatagacaattgcaaaagaactctcgattatgtcataagatagaatgggttaattttaataggaaataagaaaaattttgttatctatttggcttcagttgaatctgattgttcctctatttgaactccacagaatggacaacaagctatatcataattatgaagttttggatatgagaacatggtagcaatagatatttttttattgaatgaagtcaccaagattggcaatgaggttcgagtttcccaaaggcgtagccgtggatacatctggctatgtgtacgtagctgacgatgcgaatcatcgtattcagaaatctgatagcaatggaaattttagaaaagaatggggagaagaaggctctgacaaaggagagttcaagtttcccaaaggcgtagccgtggatacatctggctctgtgtacgtaactgatgatggcaattgccgtgttcaaaagtttgacagcaatggcaacttcattggtgaatggggacgcaaaggctctgacaaaggagagttcaagtttcccaaaggcgtagccgtggatacatctggctctgtgtatgtatctgacgacgaaaatcatcgtgttcaaaagtttgacagcaatggcaacttcattacaacttggggttcagaaggttcgagtgatggtcaacttaagcatccttatgggattggagttgactccaatggctatgtgtacgtagctgatgatgcgaatcatcgtgttcaaaagtttgacagcaatggcaacttcattggtgaatggggacgcaaaggctctgacaaaggagagttcaagtttcccaaaggcgtagccgtggatacatctggctctgtgtacgtagctgatgatggcaattgccgtgttcaaaagtttgacagcaatggcaacttcattggtgaatggggacgcaaaggctctgacaaaggagagttcaagtttcccaaaggcgtagccgtggatacatctggctatgtgtatgtatctgacgacgaaaatcatcgtgttcaaaagtttgacagcaatggcaacttcattggtgaatggggaagacgcgattgacaatgtgatttaatcataatcacaaaaaataaaatatgtctaaaacgaaaattatcatttaacatagtctagaatgttaaaatcctaaacgtaacctccggaccagttacctgtcctgatctattttatagtttttatttatattttcttgatattggattctaaatataccaaagtattgcagtaaggttattgaacccctttacctatacaactctaatccatttgtgaccagtccagtgatagtaaaaggtaccgtcattagcaaaacaataaggaactgcttaatttaaaagtaaattaattaactataatttggtcacatagtttttcatgtatgtaaattggttaaattgagtcaaatttgtttcatatatcgcctaacccatatcagatctgtaatggatatttgtataatctgatgagaatggcagcagccctagaatgtctgatttgaacactagatgaactagtttattgagcaagtatttcggctaaagataaatcaaaagctacgtcaagacaattaaagcatataactatcacttttgctttcactttaaagcaattacagtgatttttcagtcaagggcttaactaggaaggattaattgaccgatctgattgagttcatgaaagatttacaaaatgagatgcgagaaccctgtcatgaatcagatactcgatgcttataaaccgatgtgggcgctaaaacatgccatttctctaatgggttgggactttgaaacttatatgcccagagaaggggcagaagagaggggagtggccgattctcagcttcacatgatgcataaagatctcctgctaaagaaagattttagtggtcttgttgagtcagcgaagaaactgaggagccttagtgactttgagaagggaattgtacgagtacttgatagggaaataactaagcaggtcaagatacccaaagaattgactgaagcagaatctttggtaaggataaggggaaatatggcatggagggaagcaagggcaaaatctgcttttaagatgtatgaaccgcacttgaagaagatgatagaaataaagaagcaaatcgctgcgaagataggttatgaaaaacatccatataatgcactcttggatacatttgaagagcagcttaccgtaaatgacttggataaaatattcgatgcattaacccctcgtattcaaacgcttctgaaaaaactcgtagattcaaatagcccgttctgcaaaacgaacaaacttgcaaaatcaaaatatgatatcaataaagtgaatgaactcaatcacgatattttgactcttctgcaatacgacatgaaacgtttcagaatggatatatccactcatcctttcaccgagactatggggctaaacgatatcagaataactactcggtatgaagggattgatttcaaaaagtcgatatttagtaccattcatgaagctggtcacgcattgtacaatctacaatgcgatcaatcattgtctttttctcccattgaaggaggatcttcacttggactccatgaatctcagtcaaggttttgggagaacattgtgtgcagaagtatgccttttgttcaattgataagtccattgattagaaaacaaatagatttcacaaaccaaactacagatgacgaattatacctttatttcaataatgtcaaagctgactatatacgagttgacgccgatgaagttacttacaatttacatatagcaattaggtatgagatagagaaaaaaatatttggagatgagctcaatgtatctgagattcctgaattctggaacgatagaatggagcagcttcttggtgtgaggccaactaaggattcagagggagtgcttcaggatacccattggagcagcggcctttttgggtatttcccaacttacactctgggaaatttggtttcagcaataattgcttcaaagatgcgaaaagatctagaagactccgaggaagacattaagaggggtaattttgatcctatcagaaaatggttaagattaaaaatacatcagtatggatctgcttttgctcccaaagtacttcttgataagaacctaaatgaaggatataacccagattactttgttaactaccttgatactaaatatcttcgctcctgaaccattgtctggatgatatatagaatccgactcattatcggttcaaatgaattgcaatatttaaacatgtatccagatagaagatgctaattcagcctagttggaattgagtttgcaggttgaagcaaaattccaatattggctaccgttctctgataccaattaatggaaataatactaatcattgttaaactcagttttgactgttacgggatggaacatgaaacttggagcatttcctaggataatagcgaatattgttggcaagttccataagttatcttctgtggaaaatgattggataagttcttatgcaatcattcaagaaatatcaagaagctgagttaggattaacatgtataccttgtgggtgaaccaaagtttgtcacaagtcacaattctccgtgtagtacacctctccagatggagaatgacccaccgttagtctccaccacattattattttggtctactaccgaaactgagtcctagaattgatttatcacatacgtatgcccattgtccgcgttaaagactacacctcttgggccgttcccaaccgttatagttgctatgacctcatcctgagctagcacgttaactaaatcagcaaatggaaccgctaaaacaacaaataaaaaaaaggttagaaaacaaaagataatgaagtcaagatcgaaaatgaacttattgtatacacaaatcttcatcttgaactggccacataataatgactattaattttacttttagatgttccttctatatcactttatgttgttctaatagaataaatttgatttcgtggtctgtgatcatcaaaaatatcaaagttattttgttataacctgtaatcacggaatgataatattccaggattacaaaactcagttgcaaattctgtcaaatttgtttcatctacttatcttaccctcatactatggggaatatatgccagatattctttattatattcatcatgatgtaaggaactttattgttttcatattatctggagattaaatatatctctggaaaattagagatcacaaaaagaaatatttaattgttggaaaatctctcatgtttaagcattattctaaaatcttatccaatctagtcaaattacaaatcaggccaataactgtaaaatattagaactctgaatattgagtatctgtgaatattatggatagtcaaggaaacggaaaaaacaatattaacaacaataacaacaaagaagagcaaaacatgaacaatcctaaccagtttaaattgatgacggattggtggcaacaaaattcgcctatggcttggggtgaattgtataatgaatatattgaatacattacgtccatgactgaaatatacaaagagtacattaagagctcggaaaaaatgaccgaattgtataaagaattggcaataaataccgaaagaatgactgacctgtataaagagtctgttaagattaccgaaagaatgagtaatcattggttaaataaatttcctaatcccctattttcaaaagaacaaagaccaaaaaaacgggttagtaaactaaaagataaacaataactatgattagaaattatttacaaacaaacttgaaattctcatgcggatatccttatgatttccaccgaaccagatctctatgttagtattgatcaggatattattgcaaatactacaaattcaaggggataataacgaactaagacattaattttcttctcctttctcattattcagataaatataaccacttcttgttgaagatgggggccatatggtcaagctctccgattatcaacgaaaaatttggtggtgggtttgatggtcaaattctcaaatatctaattaatgtcaattactaaagtacaaggcaaatgttcaaaagccccgattcaaacatatcttctaccctatccgatattgttacttctcctgtctctatctccaatgccccataagaaatgtatatgttccatttttgtcgacttgatccttgtagattcctgctgaattgctcagaaatgagagttcacctgtagcaccatcatcaaaaatcgctattccgttgctatcaaaactaccgtctgggttataattgccaatcgcataaaacaagtcggtatatctttatcatcagtaacatattttgattttccttggatgtaggatgtgtcattatttctgaaagtctcagtgccatttcccgatgcagttgtgtttactgtaccgttaattaatccctcgcctgggaaactggaggtaatactgttgtctatagtttccggcttccctgccatagtctcataatgttccacaagaaatgggtttcccagattcataaactgagaggtgttggtgttatcaatggcttgggtgtattgtgtgatggcggtcatagaatagaggagtacaaatccaataatcaatgctaaagcactattgtttttgcttctgaatttcaattcaatcattttgatatagtaggctaataggtttgcgtcgtatttcaaggacgaatgttgaaaataatattgattataaattggtaatattccttactctgttgttgatgattcttttgacaaaatcatgttcgtattctagaactaactaaatcattcagatcataacaatggagaatctatttaacaacaagaaatgaattacagaaatttctgggcaatcaaactttaatcgcggcttaatttcatacctatagattttttcttatatttcaaaaatatgtcatatttgttacacttaccactgaagccatctagggtaactaatctcaggtatcttgggtaggctatctgccccatgtcagtcactatatctcttcgatattttcatccttataccattttttggtctgagtgttactagtgactgtatttttatatttgcactatctttctcttcaagtgtaatcttccaattattaagaacatttgctaacacgataataccttcaatccaagctaatggttctcctatgcatgatctaggaccgccaccaaaaggaaagtagcaaaatcgtggcattgatgttttaaattctaaagaccatctttcaggaataaacttttcaggatctgaaaaatacctgacatcatgatgcattagatattgactcattataataactgagccagaaggtatggaatacttttcatttagagagtaatcctgtatagtctgacgacctatagcccaagaaggagggtagagtctcattgactccatcaaaactttttctgtatattttaatcttgttaaatcatcaacggtgataatttttctgttgccctcatcatcctctttctccttatgtatggtgtaaatttcatccagaattttagactcaatcttaggatgacaagataacagatacaaagtccatgtcaacgcattagcagtcgtctcatgccctgctaaaaatatcgtcattacttcatctctaagctgcttatcagtcatttttaaagcagctttctcttgttctttacctttctcggataataattgttcttcattatcatttacttttttgtctgttgaaccgataagaacagaaagaatatctaattcgttttcatatttttggaaattcttttgtcgtcctaattgagtaccattagttttagatccatttattttcttgctttcatcaacagaaggtttttgacgttgcagatcaattttactataaattgtattatctagttcttttaaagcctctttatattccaatgttaagggtataggaagtcgttcaataaatcttaaaaatggaagtctgagtttgttaatatactctataattagtgtaatatgatcactaattttatcgatctcatttaatgttattgcattttttccaaatagtagtttactaattatagagagtgttaatttagtcatttctttatgaatgtttactatcattccttctctccagtttgtatttgtatattcaatacaatgttctgttattatgtttccaaatatccttatcttgtctttggtaaatgcttgctggatcattctcctttgctttgagtgactttctccctcatttgttattaacccattaccaattactcgttttgctaactgcaatcctggactttttacaaaattttgattatgttttactagaatatcctcaatcagatatgggtcatttatgagatatacatgtaactttggtccaaatttaaaatgagaaatatcgccgtacctattggtgatttcttttagtattggtaaaggatttgatatgaatttaaaagccaacctgtaaggaaatatctcgcgtggtcctggtggatatacgtgatctccatttttattagaaattgacttcactttcatgaattctatttatgttccaacatgccgaggtataattatttttacgtgatttgattactttttgtgaaatattcatattatttgataacttttcactggcgccattcaaaattcatggtataaggagtttcattatcaagttagaaaggtgacgaaatattcacagaaccgtaaatcatccttgtctatctctcctactaacaagtccccttccccaccgactgcgctactctatatgagtaacgatattttatgaaagggtattagtaatttagaataatattacttttaggtaccccttgatatttaaatcaccatgatatcattgcactaccacagtctatccattaaatcaatttgagtatttaaggtcccagagcttattatggtgggaacaatttgaagagtgatagcagcttgttctatatattaaatatcatataatttagtttgtcaagtgaaagaaatgaatctgcagggtaataaagtagtgatgatttttttggtaagatccgatataaaaatgagcaaaggacaaatcgcaggtaaagtagcagatgttactcaatatgttatagtggaatgcatacagggaaaatacattacatatacaacgtggaagaaatttcatgactctcaaaaaattgtcttaagggtaaattcagaaaatgaatttcatgatttacattcaaaactgattgagttatctcatgaactaagttttccaatcaagattgtaaaagatgatcaaaaaacaaagaaatctgaaaatatgcccacagttttagcatttggacctataaaaagaaacaaggttgaacatattgttgctgatttaaaattattgtgaattgctataataataaattattactctcgtacgacgcaatgtgcttagatagatttacttattcaattatattttgttatagattgatgatcttcttgtaatggatcccttgtataacaacgcccgcgtcaaaatctatttttaactaattgtttgttggtcgactcatatagatatccatatgagttctaccgaacacgatacctatccatggtagctattggacattcttttgttgataatgcaaacgagagtattgatacgctgaattatgttacgaatctacttatgactattcttataattacttaatattattgaagaggattttctatttcatttttcgtatagatcttaaacattcttttgatttcatctctcattccttccggtacttcataatagactattatctgtaaggaattgtttggtaggctgtgagattgagagccatgagtttttcctttgaattcttttattaaatcagatagcgtctcataatgtgttatgatcgtatcgggtgacccttctagtatttccacagagttatccatcggctgtttgttgtttgagttaggccatgattttttataattgtagttattcttactgttataattattctggaaatcatttttgtaaagcgtgggccttgacgagatactattgtcaattgttcctgcacctgccgatttattgctatagattgctctgttcggacaaaaatgtttcttctttgttagaacctctgaatattcgctatttagggtattccagtaaattttggtgttacaaccatagacacaatactttgaattagtgttggagacctcggatgaactcatctaaataattatactttttagttaatatgtattacgctgtgtaacaataggtaatttatcaagatattttcattattgaagttacggactttgacgaattaattactattatgtttcgttaagtcattaatcatactgaagaccattattttaataaccctctcatgatcaatatggaatgttttctgtctcaaataagtaagtcctaccttctgcaacaggaactgatgtcgtaggtcactacacgcagatggtatggaaatctacaactgaggttggttgagggaccgccagcggtgggccagatgactccaatgagttggacattctagtttgtagctatagcccaccgggcaactacatggggcaagcaccgtattaggagagtttttcctgtcactataaatatcccatatcactctgtaccaagatcacgaacggagttgctccaaacaaaataagcaatgattgatgagaagaggtaaacaatcctatgttcacacaactattaggatcaaacatcctttttggttcgaataaaggtcggtcgagaatataattattcctgttgaagatatacgataattaagaggattgcaaatattctcagagaagcaaaaatagtagaatgctcttaatttatatcgagtttattttgtataaaaccatgaaagtagatatttaactgagccagggtcctaattttattttgaagattttgttctataataccaacccaattagattaatatcacatcatctgttttatctattaggatcatggttttctattgtgcgactgtaatatttcctacaggtagtgtacgattagaaagttctaaaggctaattagattcctgcactaggggttcagccggatctgcaattgcaagtggccctccatttacggctgttgggtacaatgtgaaatcctaatattgaaaaactaaccattatgacggctaccaaaaataccttaagtacatccatgttcctataactttagcacgagtatttaacatgtgtattttttatctgtatgatttcaacgttgtcatttgatatatcaatacctaaccattcagtgaatgacgcgttagtatagctcataacttcaaaaaatagaaatcatctcaaatttgcatacttatgaatttcattgtataacgctagttaacaatgtaattataaattttgtatgacctcatatatttacataaattttatcataaatatgaaagccgtgacaaacttggtgatattgcagttgctacttcggttaaatatctcaaaaacagataaatcgaatatacatggaatagatttttactattcaggattacattttccagggattgatgaaagtacttgcttttgctatgatctcttatccaccaacaaacttgatcaagtagatgattatctaaatatgattgacaaccttttggatcaatttgatatgatgatcaataaaacaaaatagaattgccaattaattaatagaatgttctatttgttctaatcttttatactagtcttgacaaaaaaactgatgtgggattcgcgatattagctctactaaaaacctgacttgatcttggccttctaaattcaaaatcctttaatattgttataatagaccctttgatgaattcgaaaatcattgccacaatcgtaattatttcaatgtttgcaggctttgcagccttagtcggccaaatatctcaacaggcttctaccgcttctattccttgtgatagcaaagggtcaagtggtcaaggagctacacattgtaactttggagattgtaaggtaataattacaccaagtgataaaataaactcaaatagcaagtgccgataatacctacaataatcaacaattgtatgtatagcctttttttattacaccaaaattaaaattgggttagagtacttatcaagatattttattatcgttcttgtgcctgtaaatataagatttcattatttgacaatatgatgaaaacaaaaggtcagaatataaataagttttgctagtaataaaatcaaatattctcagattatcaatccatttaccggactgagtccagttagagaaacctattaaacccatgtggatctcctcatgatttccactgaacccgctagctgttttactattattgagtgatagaaatgggtcaaatttgtttcacctaccaccgagcctgttatgttattgctcctttttcagaactttatcccaataaccagaaaaaggtagattgatagaaatagaatacagtgatcaatattcaatgatcctgtttgcaatacggacatccaaaacttgagaaaaatacgtaggaggattaaatatgttcattgactttgtggataatcttcgtgggaaacaggtacaaggatacgtccaggaggtaagagatgagtctatactaattatcaagttatatatataacgataatacatagaattgggatttattaccaatatatttaataggatccattacgatactaaagtatggtttttaaagttattatcagacaccccagtgaagatgatgatgaacacacttattatgggatagtttttcccaaccgagacatagggcaaataaagcgacttggatttgatgcacctgataaactgaaggctacgtttacttttgattcggataaagtaaaaccaggagaacattttctagctatactagtaccagttaacgaaagtgaaattacggaaagcacttgcggcttgcttgcatgtaaaatgggaacaaactcagataaacctgtgccagaagtagttgatttctaaatatttattagaaacaacagaaaaatccaaccatttggtttatcctttgagtcaaacaaactcaaagaatttttaaactcatcgatactgaaattaaattcacttttctgagccttatctttttcatctatatgaagaaacttgatttaataattagactaatttcaaggagtgactcaagtggaaattgtcatgatatataccaaacgtgccacatattttggtaacgatgtaatataatagtcactggcacgacagatttatagattgacgatggacagatcttggcagatgaagttggttaccgaaaagtaagattatcaaggtgccccgttttagactatgggctggaacggcgctcccggttattacgctcaggtattctgaaggactacgaccgaggttggttgtggaactgcacataatgatgtactgtggttcacgtttctggtgtgttagtacaccccgatggacaatatctttgggcagctggagtattagaaaagccttgttccaatcaccgtaagtatctgtctatcaatgtctgccaagatccctgataaagttgctctaagcaacatataccctattaaactaaggataggtagaatcttaatcatctccatctttccctattcccctacttcctccgctgtccccttccccagtagtcgtataaggagatactatggattcactgtgataatatatggtaaccatattttatcagtttaatccattctttatattctcagaggcattaatgcccatgttcaggtggattattaccataaatgtttaatgtccctgtaccattattatattggtaaaacgatgcaactggttcaggataaaccttattgtttacggttattggtgtatatttactaattccttgatataattgaccattattttcctttgtaatgttactcacactaaaaactcgacttatttcttcaatgttttgtgaattatttttttgtaaatcaccaattctaaatgagaatgatgaaaaaatactaatatttgaaataatcactttgttgttttctgagtcgaacaatggatgttggtctatcctttgatttccactttcattcactagaaccgtacacttccggttgtagggttgtatcgctctcctgtagaaccatacccttcaggatccttgattgtttgcatggtaatagataggtaaggcttacttacggtatttgcatcaggaatttgagttgcattttcaaccgaagatactgtcgtgtttcgttgttgcgaatatgatttgcgaataataggaatgccaccattaatcacacaaacagttgttataaatattgatacaacacatatacataaccaactattaaaagttctatccattgttaatatgatgattacctagtaaaatactttaaaggtcgtctattcatacgatgatttcaaatactttagaaatcagtcgattatattattaaaaatggctttcgagtcaaataatgtgcgatgcagctgaagtatattttcccattataagtttgtacatatcccttaccttattgaattggctcatcttaatatccccctcatttccacatgacctgcttagaaatacacctaatataacagatctatgctagtaagtcaaaatcgcaatgttagcttgtcaagtaaatctatagtagttttcgtgtgctagatcattgtttttcacccactatacatatagcttcattatctagaactatggaatctgtattattttttacatattttgttgctgcttctgtaactgctttccatatcaattctttgcgatctgaagtttgatcggctaacattgcaagaaccggggcggctatatctttagtgaaatttgtatattcttcagcagtatcaaactcaaaggttacattaatccgttcaatctcgatatttttgaatccacacctgataaaagaattcttgagaattgtttcatcagctagactatatggtcccggtgttctacgagaagatggtgatggaatattgagtacctttcttactgtatccatagccaaagcaagttgaggaactttctctgatgttgcccagacactagccgcaaaacgcccaccggttaccaatgatttatagatattagataatcctgagtcgagctcgtctaaaaacatcaatcccaatctacataatgccacgtcaaaattcgattcgggtaagtcaatcgttgctgcatcacctactttaaagtcaataattccttccaagtgctcttcgatggccctcttttttgctattgacaacatttgtaatgatatgtctgtagccatcacatgaccactggtacccactcgtttagctacagcaattgcgggttctcctatcccagttgctatatcaagaactcttaaagcttgttttacttttgacatatctattaatttgtcactcattttataagcaccattttcaaatgtcttataccacttttcccagcctgcagctacactttcccaatcttgacgttgatctcgtctcgattgctccacataagaattaggcatattatattaactctatcgatcacattattatttttaaattgtattgactttaaggatcaatttaacttggcaaaattaataaaacctaggctgattcgtctttgcataaattccaatcgatgatctaaagactaccgaattactctatctattatttagaagtgtggatatctcattattttcaccgaacacccttaggcctatacaataatatatcaaatttggactatatgtattgtatattaattacaaaaatctggtccatcaccgtatcaaaattttgtaggcattaaaatcaaaagaggttaaacgaccgtattcgatgatgctttcatggttttagtaggttatgtttcataatacttcaaaaaaagaaatactgatacactggaaacttacaacatcagaaatattcatccttcgctcatttattgaaccagtacatagagaaatccggtcttgaatcaaaacgtggagcctatgataaagtaactgaatttgattttgttttactttatctaaatatcgttttaaagaaaaacatatcgtatgacgctattagaagtgattgtagtgagttagaatcaaataacaaggtcccagacttagaacacatatttcaattctgaacaaaagataaatgtatagtgccactatatttgaggacgattttagaaagaggcctgaaaaataaaaagaaaatatagacaaatttctactcgaattagtaatcatatgcatgactttatatacccatattcgtaataagtgctgaatgcgtagcatttctaatgtaaatactctgtctttagttatagtttcaatatcattcattttacttttaggtccaacttcaatgaccatgaatgtgtttgctacaaccaatacagccaatcaaggcataggccaatcacaatctgcaattcaacttggtgtttgtgtatcggggaacggtacacttttttcgtgtaataattcgaatacacaaaaccaacaaaacactggaaacaacgcattattacaacaaggtggcagtggtagtggtggcaattcagccaatcaaggtataggccaatcacaatcctctaaccaaggtagtggcgtagcctctggtggcaacacaaataattctggaaacaacgcaaatactcaaaaccagactaacactggaaacaacgcagcagctcaaagtggcggtagtggtagtggtggtaacagtgccaatcaaggcataggccaatcacaaacctccaaccaaggtagtggcgtagtatctggtggcaatactgctggttccggaaacaacgcaaatactcaaactcaaaataataccggtagtaacgctgtcggacaacaaggtggcagtggtagtggtggcaattcagccaatcaaggtataggccaatcacaatcctctaaccaaggtagtggcgtggcctctggtggcaacacaaataattctggaaacaacgcaaatactcaaaaccagactaacactggaaacaacgcagcagctcaaagtggcggtagtggtagtggtggtaacagtgccaatcaaggtataggccaatcacaatcctctaaccaaaacgcacaatgtgtagcaggcggcaataccgcaaattcatgtaacaacacaagtactcaaaaccaagcaaatagtggaagcaatgcagtaggacaacaaggcggcagtggtagtggtggtaacagtgccaatcaaggcataggccaatcacaatcctctaaccaaaacgcacaatgtgttggtggcggaaacgtagctgattcatgtaacaacacaagtactcaaaaccaagcaaatagtggaagcaatgcagtaggacaacaaggcggcagtggtagtggtggtaacagtgccaatcaaggtataggccaatcacaatcctctaaccaaaacgcacaatgtgtagcaggcggctccttaagcaattcatgcagtaacaaaaatacacaaagtcaaacaaacactggaaacaacgcagcagctcaaagtggcggtagtggtagtggtggtaacagtgccaatcaaggcataggccaatcacaatcctctaaccaaaacgcacaatgtgtttctggaaaagacgcaatagtatcttgtaacaatgaaaacttccaaaaacaagtaaacagtggaagcaacgcattattacaacaaggtgccacgggtaacactgctaaccaaggcataggacaagcacaaacatccaaccaaggtagtgacgcagcatctgctggcgacacaactgattctgcaaccggcgcaaacttacaaagtcaagacaacagtggaagcaatgcagcagcacaacaaggaggtagcggtgatagcggtgatagcggtgatagcggtgatgatggaggaaattcatctgactgaggcataaaccaatcacaaacctctaatcaatacagtggcgcagcatctggtagcgtaacaactaattctagaaacgactatatgatgctgtgacctttattcattcatcaatattttcaatacttttgtttctgcctagaaagaaataccgatgttgattttgaaatatttgataatctacctgctggcgttcctttcaggatatcccaaatataagtgatagagatgtttataccaggaaaaaaggattacctaatgaagtaaattcttaaatcaaaggagatagtgagacaacatctgtcactatcgaacaggttttcgaattttttgaatttggaggatactcttgacgaaaagtgatatcaacttgtaaatcttactgaaaacgactccgaattactccaaataaaaaaccacaaaaaaattgcaacttcaacatttgagatagctattcttactatttaccgactcagtttttgttaatattggactatgctgacctctattgatatttctttggtactattccaatgtcacttttctaatgacgaatctattataagtgtattagatatcttttctgaacctcgagtattagtcaaataaacttccgctttgactttttgtattgttttatctgtgaaagaagttgcaaattgaattatacctgattgaccaactatgtatcctttttgaatagatgatgtttttaaaggagttccatcagacaaatacactttcatagttcctttcataggagtgtttgccaatgattggtcatttgtttgataattaacaagaaccttaagctgattaaaattactatctgtcagaggagcaaactttgcagagtctagttgaattgttatcttgtcctgtgatgttggaatatcaatctgttgttgagcttgtgcgtatgcgtcgttaataattacaaaattctcactatttatgacatcaaacagcgaaattatcaacgtaattacaatagtgatgatagcaattttcgggtttgggataaaaataagcggttgcaattcttgtctatggagtttatagttctcattaatacatttgatatacaatctacatttagagacattaaattaagagtaatactatattatatagccaataatgcaaatatttgattaaacataattagaagaaaaagagagtatcattatttcttttattttcctctcttcaagtattatggttttaagatattagataattaatcaattgcattgattcgtatttctatgcagaattcattcataaaataatctaccaatcctttgaaaatatctcaccttgatcaaaatagtgctttatagattattacaaatctactggtacaagtagatatcagttaacaattattagtgactggttgggttaatccaaataactgtgttatcatattgaaataaaaatagaaaatcaacaggggattaaattaaatcttttttcgtattacctgaaatattctttttctagctaatatgcctacagaaattgatataaacattacccatagacctaccatcgtggattctgaatagtctatcactttctatttagtatgctagtataattatatattttatcttctcttgtgaatctattcatctcaaaaaagtatttattatttttagagatctaattactgcaatacttgttcgataattattaataacttgatcttgccttgcaaattttaccacataaagattataagatttataaaatatattttcttgatttagtcatgttatattattaaatcatttaccagataaaatgtgtattttcctatccttcatacagaggttggtatcattgtttaaactctatgatcgatttcagatactggtaatccgtctatagatgccagcaatatctatttcatcctggcccatgtactacatagtagaaatattgaataccccactttaatagtcacgcatagataccaaaggtacaaataaaaccaaggtgcttttttagatttggaactcaaatctaatccgtcaatatgctatctatagaacttgtggctgaattgaaaataactatgtagtggtttaaattattagtaacatcatgtactcaatcagctactttgaaaaattattttacagaaccttgtgagaaaagaacctctcataccaaattggaagatacatcttttttttgatctgacctcatcaacaaagactctgttttctatttaatttatgagattaataattagataatctgaaaaatcttcgagtatagttcttttagattaattatcgttaacttgtattctgccttcaattaaatttaaacagaaaatatcaaagattgtatagatgttcatttcttgtgatcccggactcgcaccttccatattgattcgaaataatcttattatttattagaataaattactcgtcatttagtatagagaaaaattgcagtatcaggtgtctaaactgtgatattggtaatttctcttataaattataattacaatgagtaatataacaaaaaactataaggttggactttttgcaatgtttatcgcagctgctttgatagggtcggtagtagcatttggagataacatggcttatgcaggcggaaaacacaaaaaatctaatgacgcagaacaggcaattgaacaagaccaagagaacgaacagaatgcacagtgtgtgtctggggactttacaatagctggatgcaacaacttaggcttcatgttccaaaacaacgaaggtaacttagccttaggtcaaagataaacctctttttttattattattaagataatatctaaaaagtaactcattaaaattggtaaaacttcgtgcagatccaagttgatattaccttcaaatgtatcttattatttccaaagattatacttgttagtaaatactaaaatcttctatttatgcaagagatctactgaagcaagatttggctaaaggggtattaaatatgttgacaataatggaatgaatttggcatataacggccttgtgaggatgtaatctatagtttcttaatatactattagtaaaaagaagatatatgaatcctaatactaaattaaaaaaaaataaccctgttacacttaccaatagcaatgatgatcatgtcaaatctcaattaatggaaacatatattgatgcctttgcttcttcaatcgaattctattctagggtaaaccgagcgtttattgaagctttctctgtgccattaattgatgcgagggaagatttaaaagaaataaaaaaggaagcattagctggaatggacttcatgtttaatagttatgataaacaacaagaaatctacgataaatccgaaaaaataatactttctaaaatacgtaataaatttgatacaaactttagagataaaatatttgtggcatctctttcagaatttattaaaagctattgcgacctagcaaaaattacaggtactggattgatatatcaatatatctcgaatgtcacctccttttggaatactgaatttatcgaacctttgagagacgtaatgtatagaacaccatctcacaagatccactctgaaaacaaatatgctttgtttcattatgatgtgcctcaagagaataatgatatacaaaaaaacgaagaagataagattgttaaaaagaggatatcaggtacaaaactagcaactggtggatatactacgtctgtttctacaccactactgattatctatgcctttattaacagaaattacattcttgaccttctccccgatttgagtattgttagaaatttccaaaaacaaggctttgatgtatttacgacagattgggggactccaagtgcatatgatagggaattaactgtgggtcattatgtgaaccattatcttaccgacgcggtcgatcacatattagagcattcaaattccaaaaaagtttcattattgggttattgttggggaggtgacctagctcttatgctagctgcgctccatcctgaaaaaataaagaatatagtggcttttgcaacaccaggtgattttagtaatgataataatcttttaagtgtgtggacaaaaagtataaacgcggattctattgtaaatacttttggtaatacgcctagtgggtttattaacaattcatttttgctaagaagtccaatagattttctgcacaaatatcctcactttttctttgagggaaaacctaaagacatggattctataatccaattctttgcaactgagacttggctgtatgatagtcctcctataataggtgaaatatacaaacaattcgtaaatgactgttataagaaaaatctattaataaaaaatgaaatgataatagggaaaaatgataagattgatttgagtaaaattaaacagcctttcttaaatgtagtagcaaagagggatgatttggttgatcctgcatcaagtagagcgttaaataatgcgataggaagttcagacaaatcgactatagaattcaattcaggtcatgttggtgcctgcataagttctagggcacatgaacagttatggcctaaggtaggcgactggttaaagagcagataatgagaaataaggacttgattagttcttggactagggcaatttatccttattgattgacttgctttcccgtaacgactcactaatcaggcgaggggagatacttttctcacatgatttccttgacttgtgcggctagtcaaatgcttaagtgaataaatcctatttgtggtatttgcttttctatgtaagatatatatcatgcaattcgtttaaagattgatacgacaattttgttataatgatgaattacggtaagacttaactatgtacaaaatgactgtatttgctggatttccaaatgacaaatagaaaaataaaaatcagaaacagaactattattctaagtttatttaatacaatattttttcggctgtggagttggtctcatttgtggttattaacgacacattgtctgaattttcgttagtcacatagatattaccattgcttgggttgtacttcagaaattgcgggcaatctcctgcatcaatagtatggatcattttgttggtaccgcattctattactaatatctgttccaagttactagcatacatttaccattgcttgggtcgtattctaaagcgttgggactactgtttactagtattgtatggatcactttgttggtaccgctatctattacagatatatctcctgaattaaaattggatacgtagatattaccattgcttgggttgtactcctattctgtggagactctcccactttgatagtaatcattgtcgattgtgccgatactttccaggtattcaaaaaagtaggagacaaaacaattgacatcagcaaaacagtataacatatatatctagaaataggttttttatctttcaattcctcttgtttttcaggtaatcacataaacagattgttaagtttttttttacactttcataaaatttctgttcttcgtattaacctcgttatcttaaggatatttttacttggatttatatattcaaaaccagtaaaggcggcggatgaaaccgtgtataatcaagcggtgctaattcctgttctatctttgatcaagagcaatccaaaaataattatcatagactcgcaatttagactcctcagggtagtacaaataaatcttatttgaatagcagcttgcaataaagttggagattaaaattgagaatattttaacataatttagtagtttaccccttcaatgcgtgaaaacttgttggactgataagtcacaaagcaattttatatattatcatttattgttattgatatgcaacctataatattatttataataatactatttagtgcaagcatgttattgccaaatgacaaggaggcattcagtcaaccatatcaaaatgaaaatgaaaccgcaaatcacgatttcaagacgttactaacgaactccttgaatttttctgatccagtttatcaagcatactcaggaatcttcctaggaactaaaaatttatcatctggtccacctataataagcgaagattatgctatcgaaaaagcagttatgaaaaacgtgggtaatgtaaccaataatatgaccttcataaatactcatttatcagatggtacaattcagagtgcagccaagggagtgattacatctgaagacggacagagcattagttggatctcttcagatattggaatgattaatgaccagggtgaattgtttcatggaattgtccagtttgaaagtacaaatagttcaagtttctcatttctaagtaatgccacaggtatggacaaacagactccagagattaaaaggacaatttggttaattaagtagatggaatagtgtggagggtaaacaactcagcaaatgagttagttgaccatgtctctagaccgcgttaatatcttatgatctctattcaaagggcatatcaatagaaagaaacagtgagattcgtgtgaaagtactacagatggttaaacacctttgtatataataattatagtaaaatgagataaagacattgtaaattgacaatcaataaagatccataatttattattgatagaccatggatgcttgtaagagtagttgaatttgatgttttgagtaattttttacccacttaatattttatgtaatgtttatttaatgtcgcaaaattgacttgatacctttatcagtggcgatattcctgtgattgaccaaatccctatccgcaggaagcttaatcccgccgaattagaaatccatgctagtcatgatagttattaaattaataataataagtcattaatcaatgacatataaaaaaagcgaaaaatttatgataatctcaataattaatcagttatctattcagtcttcttttgatatagggaagttgaatacactagatattattttatctgctttatccccttatcgatcccaaagtaaatccttttatcatttgtctttggaaagcaacgataagaataaccacaggcaacagcgctatagtgatccctgcagccagatatccccattcgatcctgtacaaagatatgaattggtatagtgccacttgaaaaagagtggaattcggagaatttgcgagtacgatcggaagaacaaactcgttccaagaaaaaataaaagaaaatatcgatgctactgcaaacccgggcatagatagtggaatggtgattcttctcaatactccaatctttgaacatccatcgatttgtgcagattcttctaattctttcggtatcgtttcaaaataattttttaataatatcacgttcaatggtataatgagtatttgaaaggttagaatcagggaaactagggaattaagtagacctagatttgcaagaatactatatagaggtattatgtttataacaacaggtatcataaataaacccagtataagggaaaacaagatccttttagctttaaactcaaaacgagctagagcgtacccagctaaagcacaaatagtaacatttagaatcatactcccaaaactaactattaaactattgtacaggctttttacaatagtagaatttgtaaatacaaaaacataattttcaaatgtaacatgctctggaattagtttcgggggaaaactcatagtttcatcatttggttttaatgatgtagtgaaaacccaaatcaaaggaaataaggtgagtccaatgaagataaatatcgcaatataaataaaggatttttcaattttttcaatcctactattagaaagtatactcaattttatgttatcccctccgttttaacgcgatgatatagataaaagcaactactatgttgatagatagcaatataattcctgatgccgaacccttagacaaaagtccaaattcaaaggcctgtctgtacatgtaaagcgatgcaggagtactagcgaataatggattacctccagtcattattaatggtatttcaaaaaagtttatcgaccagatagttatcaagataatgtcaattattataaatgattttatcatgggaagcgttagatagaaatacgacttgattttagaggcgccatccaccttagcagattcataaatagatggatttatagataataatcctgcggtgagaaataaaatagtaaatggtgttccataccaaacatttgctataactattgaccatacaactatgttaggatctgacaaccatgcaatagacgaaaatcccagatattctagaatgtagtttataattccaaaactgttatcaaaaataaatttaaatgaaaaagcagcaatcaatccagatgtaatccaggggatcataatcaaagcgatcaaaatttgttttcctttaatattttgatttaatagggatgcaataagtagaccaatcaaaaactgaaatgccacagatcctcctacaaatattaccgaaattttgattgaagtatgaaaatttggatcatttaaaacttgtataaaattatcaagccctacaaattcccattcttttaatattgttgttatcgagactccatgtgtggagatataaatattccatacgaatggaaacaatagaaatgcacacaaaattgagatggccggtaatagataaagatagggctcatattttgctatagaatgcatttctataaaaaataatgtatggatgtagactttgttaccagcctagaatttcagcagtctttttggcggcatcatccagagcctgtttaggtgcttttatgttgtaaaaaacctcatcgatagcctgttttatattctcagcaatttgaggatactctgggatgtttggtctactattaccctcaggaatcatagatatcagttcagagtaataaggtatagtactatttagttgggatgagtagttaccctcgccaattggtttttgagttggaagatacccttcttgttgtaacatgggggttaaaatctcaggatccaccattagtgtcaacaactcccatactaaatccttgttaggagatgtttgtggaatacttaatatccacccacccatcattgtggtggtattaacgtttgatgatggggttgggaacatcggaagcattccaatcttttcatccagtgagttccattcacttttaggaaaagtacctaacaaccatgatccctctagcataactgcaaactttttatctgcaaattcctgtccccaaaagtgattaggttgaggtgaaatacctgcgtccacttgttgctttaagaattccaatgcctttacaccctccgagctgttaaatgccggataccaatatgatcccttaacaggatgattgtctctttgttcaaggatttgaccgcctagcatccataaatatggataccacatatcaggagaatgagcagctcccacaagatgtactccctggatcccacggtcttttaataaatcatttaacttcttggcggattcgatatatccattccatgtagtcaaattctctggattaatccctgcttctttgagaagatctttccaataccacatcgctcgaacatcagtccaagaccaaataccataggttttattttcatattttcctccttcccaattggttggataccactcatttgctcttccccactcatttactttatcggttatatccgaaagaaaaccaccctctgcaaattctccgagccatatttgatcaacagatatcaaatctaatggagtttgtcctgccatagaggttaagatctgtgttctggttgcgtcatatggcaatacgcgatagtcaatctgaatgtctaattctgggtggttttgtcttaatttgtccaatgccttttcaaataaaatatcccatctctctttaggctctgctacaatcgctgtcagtgtaacttgcttttgctgctgcccatacacctccccgtaattattttgtataaaaaaagttacgaaggctaataaaactagtatagaaaatgaatgcacatataatttcattagccttataagtacaccaacttttttaagtattactcaatctataaaatttcatctaatcaatctccaagttttgaagttgcatctaccgtatttctaaaagtcggttcatattacaagcagaaaaacacattttgaaagagtcactctattctctctcccttatcgtcaaaaaaatgcatctttgaatactcaattcctatttctattttatcacccacatgccaaggatttaaaatattatttgtagtaacaagcaaattatccgatccaatttttacttcgattgttgtgtcatcaccaagcatttcaataaagaccacaattccatccaacctgattcctgttgaaatgtcagtttccttaagaataattacatctcttggtcttatcccaacaatgaattttggagttagttttttctcaagtagtattttatcaaaaggctgaataacaattggctgtgagaataaaaacagggatttatccctaatagatccattgatcaaattcaattgtgggttaccaataaattgtccaacaaaagtgttcttagggtgatgatagacttcagtaggagttccaatttgctgtatattaccatttttcataatggctatcctatctgccatactcatggcttcaacttggtcatgagttatatacaaagtagttattccaattttcttttgcagtttctttatctcggttctcatatgtgttcgaagctttgcatccaaattgcttagaggttcatccatgagaaataacttgggttctcttaccaatgctctaccaagtgctactctttgcatctgtccaccgctcaattcctttggttttctgttaagaagatcctttattcctagtagctcagccatttggatgaccttttcttgtatgtgagatttagatatttttctcatttttagtggaaatgcgatgttatcataaatagacatatgtgggtatagtgcatagttttgaaaaaccatcgctacgtctctatccttgggggataattcgtttacctttttatttcccagataaatttgtccatttgtgggagttattaatcctgctatgcatctaatagcggtagtctttccacatccagatggccccaacaataccatcaattcacccgactttatatcgatactaaatttatccaaagcagtcgtctctccgtatttttttgtgaggttttctattttgagatcgaccatatctatctctcctggtgtatatcattatttaccctacataaagaattacatcagaaaaaattaagagaaaatgaaattgctaaattactttaattcatttttttatctacaatatataactatttgaacaagaaaaacatcatatcaaaccatatagatttcgagatcaccacagaagtcgatatctatattagtaacgaatatatcatgaaactattctaattattacaaaaaaaggtcattgctaatggctatgatatcttcgaccttcgatgctaatgggtatgatagtaggataagtcctattggtgaagagccatacatgctataaaggatactgcaaataccacacccatataaaagggtagatgtcgcccagaaaattactaaagctcatctatacctttttgtttttattttcagattatattgttttttccttattatattcgtcacccaggtctttgtcagtatctttgactttattgacaacggcttttgtacctgcctttaccttatcaactgcttcagtatctttgactttattgacaacggcttttgtacctgcctttaccttatcaactgcttcatcgaggacactctcagattcatcttgaggcctttcatttttattataatcgtctgttatatccacaaggttttcaccgcgattctctgtctttttattattctgattctcagacattgcaaattagattgtataacacagtataaataatcaatacaattgttacctattttctcgtatcatttgaagttacaactagtcatccgatgcatggagaaattggtaaatccggtttgtaaaatagcgatatggtgagtcaaatatctagtgggaataaatcaacaaaagtttgtatgagtatttacttactattgttcttatttagataaacaatagatcagatctatttatgctgacacggtctcttccgctatacccatacattgggaaagatgacccttagatcttatttataattaaataaatcggcataatgtcagctattttattaattacctttcatagtaccacactttctgatttcattgatttgaacatatttcacttcgattttgcatcatcacaatgaatataattagacaggttaaaacgatgtgattgttttgtatgttgatattatgagaaacgaataaaagaaaaattgaattgatatctgagtttgttttgctatttttattaataattacatcaaatttagttattggcttgagccattaactacgtcttgaatcccttctagtatatttccagtagcattcgagagggcttcaccagtttcattcactgcttttcctaacccttcagttacattacctgcagcttcacccgtttcattcactgcaccctgtgtgtattctcccgtttgattagcatcctcagtgacattttgagcaaaggcgttgacccctacagttcccaacaatagagctagagcaccaattatagtgaacaatatgttattattcattaatcatgagtggtaaacatgccatttaagctttatatatttacaatgcacatttgagatgataattaattcatcaaatctgtctgataaatctctttaatcccatctgctgatttaaaaattttctattgattggactatcatatctacgtgaatttcgttctgatattgaactagtaatacatctttaagttcaccaggcccgttgacttttaaattaggaaataaataaaaggataagatctcagatttagaaattaatcactagtttgcttttattgtattagccatacagtctccaagttgcgggttgagattactaggtaactttatccatccttcacgacaatccatttccttctttttgaatgcagctgcattaacatcacctatagttataaaagtactcatcatcagtgctaatgcaaccactattgctattgaagcaactactattcttgtgtttttattcttgtttttgagagttattatactcatacgatctaaatgtaaaaataattatattgaaattgctaactaattgcaatactctaatactctagcaacactagaaaattgcttatgtatttccagcaggtaaggtaacttggaatccactataaatctacaagtttttctttatcaacaaaagggcagtcttatctttggtaaatgtccgtaagtaaaccttttgcataattagcaccattaagaaaacttgcaaaagaatgagacaacatagtcgtaattcgcaaaatataaattgtatatatcatattttgccccataggatgcaaaatccataaagctttaaatgaatagtaattaagtctaaatatttgatatggatatcgagtcacagaatgtattagattatcatggtaacaacgccatatttatggtttggaattttaagaaagatttagacttcagagatggttttaagcgggttagcaaattgattatcaatcttaataattcagccaatgttcgttttcctgattccggggcaagctgcgtagtggggattggtcataatgctttgcttcagcttaatcttcctattccgctccctaaagaattagaaacctttatgcctattgttggtgaaaaacacacagcagtttcttccgaaggagatttgcattttcatatcagaggtaatggtagcagtatgtgttatgatatggcacatgcataatcgggggttttggaaccggtgactataagcacggaagaaatccatggtttcagatatcgggacggtcgttccattttaggttttgttgatgggactgaaaaccctcctgaacaggaacgggcaatatttggattggttggagatgatgatcctgtttataaaggtggaagttagctttttgttcaaaaatatattcatgatttaaatgcatttgaaagatattctactgaagaacaggaaaaggtaataggcagatataaaatgaatgatatcgaaatgtcggataatataaaaccctcaaattctcatattgctttagccaatgttggtgacgaatttaagattattcgtgataacatgccctttggaaacatatccaccaatgaaatgggcacttattttatcgcatatgccagcacattcagtaccgtaaagaaaatgcttgataatatgtttattggttctcctaaaggaaattatgataggttattggatttcagcatacccaaaacaggaactctattttttgttccaatattagatatgttagatgacttttcatcaagttaaatcaatttttttgatagattaaaactttgttttgttttgaactttaattcaataaactagaaaaattggtatggtgatatccatttgaacgaatattaagtgaattaagaataccgacaataattttttcaaatgtctgatttttttgttctttgtttgtgtaattctaccaaacttttgtcaatttcattgatgttcccatcatggtggtactatcactgtaagaatatatatctacatacccatttttgactccactggatatgctctgattacaacaattattatgtcactccctgaaaagagatatgctagaatatcataatagatatctggtcatcgatcttgtcaaacatatcaggttcgtcagcactcttagatcagtatcaaaaatgggagaggtatgcatgtaaggaaggaagcgactaaacacaatgatttgatttgatttgtttgctacattcatgtttaaacccagctatgacattagaaggccgaccctaattcagctaggtttctcgacccacttggatctccattcaggaggttcgaatggatctccaaagtagagtgtttcatgtgcgattttttcatctatgaattccatgatacatactacattaactggacgaccatcataagttataatatattcagttacccaaagatttccttctccacgcgtccgaaggatcttaaatccaagtttggcagggtaatgttttctgagttcgtataggttttttttacccaaaattcgttcaccagactgaggaaattcaacaatgacgtcgtcatgatagatctcgtgtgacttgtctatatctacgccagtaaactcccagtggcgatccagtgcagtccgtatttctagattgcccaatctcctcttaactatttcaaaaacctagattattaggtttctcatcgattccgaccctgacaaagaatgggaaaggcaacttatggttggaatcaacggatatcaagtcctgtcattgatatactggatccttttaagaaagcgtcgtctaaaaagtatcaaactcatggaaatccacatgattccacacccacctaatttgtacatactctattatgtcactatttcattttataggcgacctgttaatcattattatgattacacatcatcatgtttttgatataggcattccaatagttctgaccgacaatttcagatgattatctacctaaaatactggctactggctactgactccagatatcgaacctgttcgttcatcatggttatactttctattcttataatcatgttaaattgagataaatggatgctgctcgaaaatgtaaaaaaattgtatcttgaatatcaattaaaagctataatctgattcgtcatactttgatacaaatccacagctaggacaactttcaagatttgagaaatgtctatgaaaatgatgctcatccaaccgatatatatttgaaatatggttaaaatcacactgtttacattttattctaagcgtcataatacttatgataaggcatagtactttagtctttttttaaaaagacttttaacaattgtctttctagagctgttgatttagtatttagtccatcacattacgaactcatttgaaattaattatgattttagggtatgacaggtgtagtacttcttcgaatttaaaattgataaaatctgagattacagaaatcgtctaatccataatgagtaactcaaagaacagtaaatctttctatcgaaatcgcttctaatttgaatttttacttgattccgttaaatacaatggattggataacagcagatcaagtctgcaaattgattttccatgtccgttaattccttggtattagtgttttaacttccgggttttctttctttatttcatttcttattgcatgttttattatccattgagtatcagtattacgagtctctgaccatttttttaatacctcaattccagtatcatagttatcttttagaatatcattgaggttattcgctacagattttttaacaaataatgattcgtcctgttttagattctcgagtatgggtaggattggtttcggatctaagataaattggtccagcttttttgcccagggaagtcttggtctaataccttcagaagacaacctccttacatgaacgtttttactttgagaccactttagcattaaagatgtcattttttttggatattttacaagaaaagggcgtactgcatattctccagtgtttcgttgtgttatttgatagattgcatcagttgatgtatcaaaatcatcaataccatacttttctacaagaaatgctattggcataatccagtaaccctctctaaacattccagtctcattttgattcggaggcccaagaatgctcatcattatattaatggcttctttgtagtctctgggaagatattcatataatgtgtcggcaattacctcgacacgaccttttagttctaaatttgtgattttcttatccactgtatcgataaactttagtttttgaaattttggataggttttgaaaactttatctgcaagaagttttgcaaggtccctaccataataagattttagtttagtatattctgtcattatctttcaattcccctttgtagttgaattcctattctccattaccaatagcataggatgatgagtattggcatttattccttaaattttttgaactaatgataaattacttgattaatgtttttatatccttaattttttttggcatccgcaagtgttgagatcactccttagtattcgcatacagaatgctaccatccatcggaagtacaaattgtttatttagtctgcttctaagcaagcattacgttaaggagatctacttcaattctaacttgtcttctgataacaatagtggtaggagctgctagcttttacacgatgccctttgattcagcttgctagatcaaaagattcatcctctgcgtgttggaatctcaggggaattattgacgagaggatttgagcatatattcttccagaaccgtcccctggaatcgtgcaggattccatggtctcaacaacggaatttgaccttgcatcttttactagggacaagacaggacaacttggatttgcattaactccaactccaactccaactccaactccaccagttgacagaggtcagaacatcaactactctcaaaattaagattgagggagtagttcaataactaagaagggatgaataacctgtatctttttttagatccagaggtttcgaaacgactggccgattgaatctgataccctgaaaacagacgatacatctgagtttatatttgatgagatgggattttttgattattttggaattaggagtgattcagtgcctgattattgtgcatttttctagaaagtaatctaatatttttcaagcatgatactgtgtattcgagtttctttcaataaggctccgctgtagagactttatgctcagtttgtattttttctcatttgcaaattctgtgtagaattaattggtgctgttcttgacccttaatgatctttttctctccacagatttctattaataaccgtgaataaggttgtaatttaatatttagtaaagaatgatatcttagcgtaacgatatattatcggggcaatttgaaagtactgaatgttagaataagctctataaaatttatttatataaattttatattactaaatcgagtacttatataatagtaaattcaactttacagcatgaataagttttctttattcttaattatgagtataggagcagtatttgtcacagcatctatttttggatcaaccgtgacatctgcattagcacaaggaaatgagactggtgaagttcaagtgggaaccccattgttatttactccagagaatatgtcaatgccaatgaataatatgagcaatgtgactaccgcagcagccgattcttcggttgcgagtgatacaccgacagctgcagttccacaaggtggatcaagctcagatgatggatcaagctcagatgatggatcaagctcagatgatggatcaagctcagatgatggatcaagctcagatgatggatcaagctcagatgatggatcaagctcagatgatggatcaagctcagatgatggatcaagctcagatgatggatcaagctcagatgatgaaaacaatgattaaaataaattaaccaaatttcttttttttgtttatattttagccgacttttgttaacatacagtatattagaaaaggatagaactatcatatttgacaaacccccgagaatttaccagtttagtaaatttgatccatagtaatcgaatcttctttagtaggaaaatgcaagggaaactccaggattcgctataattttactacttaattaagacttgaaatcaagtttctactaattttaattttcacaaattttttgatatactagagccatcacacaataggcttttgtgcttgcttgctactacacaggtgctgtcaaatatggcagaaaggtaaaaaattcctactattatcgtaaatttcattttgttgctctcataacactataatcttgctagaattgattcaaagcaaggattttgattaacacgtaatatttagaaaagttgagttgaaaggactttttagatgatgtagcattgaagattgtcctatgttttactctaaagctaatcataaatgaggcagcatctgagaatgcaaaaaaatactttaagctatttattatttcctaaaatcaatctatttagcaagttttggtcatagagtcttatctgatctacatgatcttgctaacattatttaaaaaaaatgggaaggtaatgtaagttttttaccgcctttggatggatttgctccactaatagggtgtctgtcccaggtagttgcctggtgggctgtagcggcatactaaataggtttgaccagcgtcactggcgatcccgcaaccgatctgagtggtgcccttccaaaccatctgtgtgtaatgacctatcattggaacaccctcaacaaagtcattttcagtgagcggttggccatcataatttgacttttcggcggcccatccatcgacaccggctgcggtggtaaagtaatctttgtggccccaggctaggttctcaccttgagggttgttaatatcgaacggagcatggggtgctttatcgtttgggcccagcccaagcgtagtaatatggtccgcccaactttgtgcgtcagcggctagactgtcactccacgagagggctgggttattaactgctttgcgctcttggtcgtggatattcaatatgctgttttggaaatctgcatccccctgcgagtatgaaatctgcgaaaccgatgatggcaccgtcagaattgccgttgtgactaaaatcatgattacttttactgatatattattatacataatttatcagttaatgtttgatgtattttacttattaatgaatcgattaggtaatatactggtctttttttgagaaaatttgtatttgttatctataaatgctatgttaccgactcaataatcaatttatattctaaggaataccgagtaataccaaagagctactcataggagacatagtcaacaaatcaaaagatgcaattaatttaggatttcaagaacctactagtagaaagacataaagcttgaaatattctacagaaaataacatcccagtctttgggagcactcattgacataagttctatctcaaagatatcaagatctagatgttaagcatcttcgaccttctataatccttaaatatttgtccgaaataaactaagttttgaattttaaaggtaaaatgttccataattgtacaataatattggctgtactttccttgtgtattccaatcactaattaatttaatttagtatctgctcaaagtaactcactaacgggttatgatcatggacgctctgatggggatatacccatatcgggttaaagatatttaaatcagtcagaaaatggacctgaatatcagaccggtgaatttatgaagggctatatgaaagggtttgctgaatgctataatggaaactattcctgttttgaccaaggctactttgccggaatgaactatgctggaatggcgggtacatttgatagtggtaattacgatagatgtggttctctctactataacggttacgtgttacatgtttggatgcatatcagtaccgggaaattactaggggcgtatagaaatgttctaggcgaagacaaagttattgacaggcattaacaaggatgaacttaaagctatttaatttatcacagatcttttcaattaattttgattagtaaagtacaatatactttaagacaaaatagaattgtagagatctcattgtcacattctttgttacgtcaagtaatgtatagatctcaacgaaaccgagagtgaaaccaatcatctcattatgtattatgccatctacattgcgttacatggtcattcatttcaagtatcaaataatgtccatacgaactgaggaaaaaaagttaagaggaggaactcataatcactgtcaaaagtaaatacgcgattaccttataaatgacaaaactatagatacgttacaatgaagcaagatcgcaatagatttgtgaacatagaaagtagcaagtttttagtagcagttacattgtgttttagtcttatgattataataactgcgacaaatatgatgtcgccatcagccatcaaatttccaacttttgccttagcacaagagcagcaaaactttaccacaaatcttgtcgggcaggatgtggttccaccaataaattctaaagctactggtaccgctgagtttactcctagcagcgatggaatgagtatgaattatgaggtgtacgttaaggatatagatggtgtcacacttgctcaaatatatcaaggtcaagaagatggaaatggtcctgcattatcaacactcatacgcttcaaagatataactccaagcggtccagtgaatggactgttaacccaaggcgttataacatctgatgatcttcaagggccattgattggaaaacaggtgtctgatctgactgaacttatggaaaataacaatacctacgtggaaatccagaccacagaaaatcctaacggagaaattagaggacaaataatcaaataaaataattgactatgcatatcgattatttgggataattgatatgattgatttctgatagaattttatggttcttgatagtcaacaagaatcgcctagtgaatatggagagctttcagctagccacaataccaaaattatgtgtcatacaactgcacatgttatgaaatatgtataatgatgccaaacgaaatatttggattcagtaaacccgatatataagaaaagaaaaaccagtaaagcagactaatttagtttaaaattttatttcgatctaataaactcatactgatatccttattattcccacaggctcgctacttatttgagtagcactataagactaatcatctaatagtaacacgtgcaaacattatagaactagaattatcttattggatgatagctaggaaacattcagatatcatttatttgtagttttgaaaagctacccaatgagtagtgacgatataaaaaagggcgagccaactgaggaagtattaattgtaaaaaaaaaacactcgctcaagaatttttctattttcttaaaacatttggtatattgggttagcaatagccttcgttattggtcaggctgcttctggactagtgacatccttcgtagatgacatcataaatcccctaattggattatttttgcctgcgggaaatctagatgcagtgtctgtacaggtacctgatatatcaggcagaactaccgagtttagaattggacatcttatatcaagtattattgactttctgataatcgctctagtcgtgtttcttgcatataagcgactatcgcgattcaaactggtagatgataaaactatacctgagaagaaataatctgccatattcttttttgatttctcttattctttatccaacttgtgtgaatatcctcatgatactcaccaaatctctatacaattctatttaatctcactaaactatgcatcaattattaatcttgatgacaaaagtgaattaaatatgagcaaacatgtcaaatgatgacagtaggattcatttacattttgtaggagctgactttggaacaactgataatctttttatattcataaagaaaataattactaaataaatggactactattatcgtgttacgttaattgttttagtctcaattgcggcaacaggtttaattgcaatcccatttggaaatccaaaatttatcgacagggcaattattttggagttaacatttatctcactatccgttttaatatggaaaggatatgataaagcattgtatgcatgtatcccattagctacattaatcatcattggcaatagccttgctccaccacatgttaatttgatgatgaccttttctaaaccactaaatgcaattgttctgatttttgggggatatgtattccaagttattcttatatatagcagcttgaggtcaatactggatattaggtcaaagagattgaccaccgctacatgattttatgaaatataccttacaggattacgataaacttatcgcctaaattttataggcaattatcatccgaatgtttcaattggcatacaaagtgtctaccgctatccgtattttcaatttttaaaaaaggattaatgactgatttatagatcatcctactgaatctgttaacaactattacaattgatcaggtaaactgagaaattatttgaagtttctaactgggtctgaaatccatttaaagaggtcttctagaacctttttttctaatggtcctccgacagtggtaacccattgtgatgatggataaaatagatgccccaggtttggatatgtaatcaatgcatgatcagggtgtcttagttctgttagtttttgttgtaaaagcaatgcttgttgtattggtgtatctgaatcattctctccttgaagaattaaaacagaaatattggatggaactttatctatgatatcgacattaggtaacaaagaatattgtgaatgaagccaaataggacatgggccggatagaccattgcatttctcatttgggatcacagccgtaaaagacttgagtttgtctaattgcctgggcttgagctcatcattaatacttatgagagtatcgttattcatatcgtattggggacccagtcgttctcccgtacctcctgttccatttaccgatgcaacattttgggcaagaaccaaggtaatgtttccaaatagggatgtgaatacaggatcctcagaagcctcttttactgaaattaaaccattatagtcatggtctagaacctgctgagcgtacaacacgggtcccattacctggccatatcctatttcgtacaaattttgggccaaggtgcccataagtacaattgcatccactctatctgaattgttaatcgcaattcttggtactatagtggtaccctcgctatgtcccaccaaaaccactttgctagagtcaacctctggttgctgtaggaggacatccaatgctttctgagcatcacgaactagatcgtcaaatgttacatttccccatacattataatctaaaattgttgcatttgcacctacgcctcttttgtcatattgcaaaactgcgaaacctctttctgaaaggtattcagatatatcaaagaatggtctagcagaagggtaaatcaaggagtttgtatcattatctatacgaatataacccgctgtttcattcatatccgtcattccagagccaggtaccaaaagaacagctgggtagggaccgttcccaataattgggagatttaatcttgcattagtctccaatccattatccagatttattaccatatttctatattttgttatctttagctctgattgaccatgaactgtgagaaccacactactaaataagaaacataaagttaaaacataaaatactactgatacctgatttaatgacaaagcatatgtaattattggatctatgatttaagcattgtttagggtaccttatccgaagggatgttatgccttgactattttcatgggtcatcacttttgtgggcgctgttaacttaggcgtttggcacctccttgttgtgtatttttacaaatagattcaaccagttgttgacatgatctagtttacacttctctttactacatggaaagtaatcgtcaaatccttcagttcgatccttgatgtactgcatagttctttcaatcagacttttctcaaacgaagaattgatatggtgttttagttttaggaatctacaagccattgggtaccaggttccaccgtctgttgatacgtcatgttttccgtgaatcttgatcagacctgaaataaatctctctgcgataagcatgttcctctccttggatttattagctaagaaagagtgcgagaatttgcctattttctggttcgattgctgcccataaccaggagtattctgagccgacttttattaatgtctcatcaatgaggtattctgatatttttgttcttcttgttgaaacctttcgaggtttatacctttgaatccaattccaaattgcaacgtgacttctattgataatatgtaaaaaggacaatgccttggcagtatttctaagcgataagccaagaaagtacaaataaagaccatagtaaatatgctctgaagatgttttatttcttttacttaacataacagaaatagagcgtctttaagctaaagatttatcgttaagttaacagggccagccaggactaagaaacatttaaataaatcccttccttgctctttcatactatactcaattcataaggtgttgatgggacacgactgaataacataccttttaagatatttgaaaactagaatatagatgacttttatagacatttacctctccatagacacggatatctctttttgaatggtttggattctattagtcttttataacttgttaaatagatagtattaccatgtccagtaagcatgaaacagaatctcctgatataattgaagaaattattcctggaaagaataatgattacaacgctaaacccatcaatcaaaacaataacaataatcaacaatcatttattgagaattataatgaacaagaatccgcccaggctgtcatcgaggcctcgggagaatctgaaaaaagtatgaagagaaatgtagacgaagcagtggatcagattcctcgttatgctcaaacaatcgttgaaacccaggaacaaacagcacaagcaacaaggaaaatagccgaaaattatttggaattccaaaaacagactataaactcatttcaatcattatttataccatactttcaaaacatccaaaatcaactatggaataatgaagagttctttaaaaatatatccgtgatgtattataagttggttaataattatgcagaaagtacaatcactttcagtaggatttggaactacactatatttacaaatcctggcctttacaaaaatgtaaccaacaaggctagtaaatagtcaatgaacacgccaaaagaggaaatagaaatggtagagttttggtcgaaagttggtcatgtaatacctaaagctgtgttcattgttcctctaatggttctcttgaatatttcatcttaagaactaacatccaaatgtttaatgatgctccaatagaattacctataactataacaatatccgctcttccaattccataaataacccatagtgaaagaccagtaatcaagatcaggagaaaccgaactgaaacatcctcggtatcctttgttcttaatgcttttttaatctgtggaacggtactcgcaactgtgaaggcagtggccaaaagtcctatgaacgttattagaatatctaccatctattttatgtggtataactcctcttttattgactcttgtgattgtcatttaacttgaagaacgctacacggcttaagcactttcctaatgggaatattgagaaataactgacttaaataaaaattttgggatttaatcctttcataatttctttgtcaagttctttaaatctgcatccaatcccggtgaaaattcttgtggagcttcaaacatactgggtatttcaacaccttcgggaaatccttcaataacctcaagggtaccaccatcatcaaatggtgaatcacctttgaatattttatctaacaaagactcttcccccttatttgcaaatgtccacatctgattatttagattcttgctttccagatccctgacttcttaaatattagatgtatctattcttggaacgggtaatgattttccccaattgactcccagagtctccaaagccttagcaaaagccttttcatgaaccaatcccttactattaaataggagaccgtagacctgaatgccttattatcacacatttcatacaatcgacacttttgtaatctgtctgttgcttctagcattaaattatacaacatgttaagcacaagatttccactatcgtatcgtatacataagaagcagaccaaagatttcttgctccacttactggtcgagcactttgagctgtaaccaaaaagcgatgaatattaggagattctaaagcgatagataaaggtagttcatttggattatttgaattagttgaagcaccttctaaaagaatatttattgtgtttgttatttgttcaacatgtcccatctcttcagtggccatacttcttagtaaatcttgataaggtttggcgttacctctaaaatacgtgttttggaaaaaatactgtatcaaagtacgcatctccccaaattgacctcctaatccttcttgcaaggcttgagcagcttttggatcaggtttgtctgcaggttgtattggatgaggaattctatttactgatagaaacgtatcataaattactaatcattaaagtatttagcaaaggtacttaagctacttaaggatcatattggaaatagcaaagcaaaatcaaatcaatctaatattacttccaggaggggcctctcatccttcaactatgttccagaaacaaagtcgttggtagtactattagaatccgataattataggatgactatctgaaaaattcaaacaattgaaaacaagaataaagaatataatttgtaaatttagattatgacaaatcgagattcataatattacccaatctattgggataaaaataagatgctattgaaatgtttaagaatcgttttctatttttgtatacttctctttttgatactcttcacttgtttgttgagcatttgttcctgtctgacctttagaagttatttgttgatcatttggatctcttttgactgccatgggttctctcgcatttaatttggctggagtcattggttctttatctgaatactctgttaatggatcgctttctctcttcttatttgttccagcagctccctcttcgtattctttatcagtcatgtggagacttaattaacatactatttaagaacgacaactagaaatttgtttacctatcctcgtttgttaaattagggacatttatagaataaccatatttttaagtgataactattttaagtcatttaaacatacttcattccatattttgttatagggcgttacagaaaaatttctgtcacatgaaaaaattaaacataccattgagaataaaataatttatttatacgtgattaacattatttcaaaatcatgttccagacatagagcatagtaaaaggataattgaaagattgtttaattttgtgatggttgaaaattgagatatctgtaattctgatgcttttatcatagattgcctttgttatttataatatttaacattgaataaaatataattgcaagaattagtataggcaaaatcttatggatttataatatagcagtatcagatactacatattggcaacagctttaatctctaaatctctacctgttctgtaccgcatcttgtacagaacttggatctaaattaagttttgaaccacactcgatacaaaatttagattcagtattgacagcaattggtggtttgtttgaatcagtcattatttttggctcttttatcgtattaaatagtttagataaagaagtttgagaaaaaccccctccacttttgtcactctctttttctttaagatagagcattacccttggaatattctctttcccattaggatcatctaccttgtcacataaccatataacaaattcttttaacgttaaatcaggtgtagaatagccaagagaatgagtagacatgtattgttcaacagcagatctaccatcaaatgccttcatttttaatgtatagtataatatgttatctagttgataatctttatttgaaccagataggctctgttcacttatggaaatcttatagcttgaaaatgctccatctgatatgtgataacagaaaaagaaacagaacaccttcaaagtatatgtatgctaaggtctgtatttgtacttttcaggcttattaataagaagaacatcgcaaagactttcttgttttatcaagcgagtctaaatccacatgactttgaacccttattgcacactaaggttggaaaataaagtcaaatttgtttcaaataccaccgaacccgctaccaagttatagtatctagtataatataaaacaagaaagaaaggtgtttacaattgttcaattcattaataaaaatagcgtcactatatacatcttgatattacaagaatcatcacattgaaagtatcggctattttgcatgagatagcgactattataacagacttgtctctaaaaaaacaataatagaagttagtgaatctaactactttttatgacacaaattttaattttccaataattaatgatatacaatggacagagattataaatcaaacgggattgaatgataatggaattatgaacttgcaaggtgataaagatggtgggaatgatcgctctaaggtattagatgatttattgaattatactcttgaaattcgaagatcgaacaattctgaaaaatatggtggatggcaagaaaggattggaagagttattgaaaaaacatatggaagtgactcaatagagctaaaacagataaaaggtgcgatgaaacttaattttttaactactagtggacagtctgaggaacagcgacgtatctattttaataacctgtatgaaaggagatttagcagaatagaacaactgattaacgacttcaaatcagaatcagaatcagaatcagaatcagaatcagaatcttaatatgaaatagttataaatcaaatctcgaaaggtctaagaatatggaaagtatgatcatccactcggtatatgtttgaaatatggttaaaatcacatagttgacatttgattcttagagtcataatataataaaacactgtatgaaatattagtttttttcataaggcccataacaatcatcttacatggtttgcttatggtgattagacgaatattcggaatctccttttatcatgaaaactctgatcgttatctgatggatcatgaaagtccccacgacccgcttaaacttacctatagtaatatcgactcaatcgttgaaacaatataggttattgtgtatatccttttatcaaacccatgtgatccttatgatttccaccgaactagatacctattatatagtaacgaaaggacggtataagatgtatggtaatacttaatttttatctttttaaaacaaatctttttctgttttcatcttcacaatcgagttcctacgaataacgacctttgcttattttgagagtaaaggtcagttaaacgatcttttggaatctgttatggtatattcttttttgcgcatgaatcacagtatttttctaaaatggtagctccatctgcagtgaatattacttcctgagtagctgtgttactgcaacttacacagtattttgtctttccgctaacatcaacgtatgcccttatcgacgaaaatttcttatagggagagtgcaaagacaccatcataggattagaatttttttcgcttgtcatatcatatatatacatttcgcatctattaagtatgtcatgacgcatatcgctgatacagtactctaatcgttactacgaacagaaatacagaggtttcaactacttctatggagtaataacaaaatcgttgtggacaaacaataaacattctttaacaaggtgtgggatattagctaccactttctgaaagaaccaaagaactagagtatttgcagaacccaaactatcaacaagaccatcaggagttgatctcctgttttctcattgattattaagtcaagtagtgccgccataaaggcggcggctctaactattcgtagtgtatagattacaaggacaggaggcagtagtagtaccaaagcctagaaatgagtactacatgaccgttggaaatactcatttctaaggcacgatcatgacatcgtgtaatttcatggttaatattctttagaaatggtaatcaatttgattatcataaaataactaatcaaatgcaactatgtgagagagcgatggttttcgcttaactcgcttaggaatacatcctaaaagatttccggattgtacagaatcttattccatgaaatctaaattttaaaccaatgttgaaaatatttatggtatttcataaatgttatctttgacttatgggaagtttgccttgaggatattataacatactagtttctagctttttatgaaataacctaaaaaattaagaaaaagcgtcctttaccttttcttttgccttgttcaatgtttcagaactaggttttccttcagcatggtcttgtgcagtctcggcctatgctttagcgtcttgttgcgaatttttcaatttcttggctgcatcatcaataaaattgtctgtcattaagatgaatagttcaaaatggtttataatggtaagagggagttatcctacttttatacacgagagggaaggattgtatggaacttagttcccttaaagcttaaattctaaattaacactgcagtattagtagtattgtgagattgtccttgtgcttgaacagtattgtactcttctattgataaagcgacaacatagatcccactgaataaaagtattgataaagcaatcgacattattttattttttgattgatgcattaggccacaatttagaatgattcattcaatttatggtaattaatatagattaaatagataaggtgaaaagaatcaacttcaatataataatctaatatatagaccagctgttaatgttaccaaaatatcctgataagaaaggaatcatgtatattagttattactacaaattttagctcttgcaacctgggtttttactgtggctatttaaggtattatataccattgttactgatttgaaaagtaaaaactatgaaaaaattatagtattggcttcttttagtttagttgccttgggcatgtttgtttgttttatatcacttcaacaaatttatgttcaagtctcagctaccactactcctgcaaatagtaatgcaactaaaccattacctgttctcttgatacatggttatttatccgatgcatccacatggaaaaagtgggaagatttgttgaaaaaagacaatattccagttttcccaataacttttaagcaatccgatgacaaatgtggttcagctgctgaacatgcaaaagaattatcgagtcaaatcgctgatgtaacagacaaaactggtcaaaataaagtgaatatagttggtcatagcaaaggcggtttagatgcaaggatgtatttgggaaatagcactcaggatgttgcaaatttaataatgataggaactcctaatgcaggctctccattagcagtaaataatgaagtatgtacacccgcggtatacgatttaaggcccggagctgcagataccaaagtaaaggagaatccaaataccaaatattacactattgcaggtgattggaatcctgatatgggaaactgcgatctatcactattttcgcctatccagcaaggaggatacgataatcttccaaaacctaatgatggcatggttcccatatccagtgtagaatcattagagtattcagacagccttggacatagtaaaagttgtcactctaatttattaagtgaatacgagtacgggttagcaaaagatgtgctcatgggaaacaagtgacatattaatacaaggttaaccaacaccttactaatattggcggatcctgcataacactaagatatcattattttaattagatattcttatcagactgacagcagaagagtataaaaaatgatagttatacattcgcagtggatgcaaactcgtctacaactcgaaattccgaagtagacgtattaagcaagaaggaagtagaagagaattcagaagtaactgatgtatctaatttaaacaagatatactagaagaaaaaagtattaactaatgaagacgttagaaaggcttctaaaggtctaaaatattctaatccttcacaaagaaatcattcttctatatatgaataactaataggacttcctccttttttgatgatatcaataaatctacgttttagagattgccataccaagaagaaaaaccatgatgaagagattggttaccgtcttattctaaaagaaagaaacggactaaagacgacgatttttaaaatagatgattataaagtttgattccaataataattgtgatgagtaatcctattaagaaccatgataaattgtataccgttatatcattctttattgcaagtgcattgattcttacgcctctaatcgtgagtaatggtgcccttgctcaaccatctaattttaataaattatcaaaagttgaaaaatgtgcttcaggagatcttccatcttctgcatgcaaaaaagtttctgaacggagccaagcaaataatggtgatatagacgcgggtcaaacaggcggtggtactggaccaaatttgggtggaagtggtaatggtgtaggtactggaagttctacaggtggctcaaacagtgctaattcagccataaaccagaatcagcaatctacacagttatgtgccacaggcaacgtcaaagcgttgccgcatagtactatcatatgtaataacagtgctgatttaggtcaagtaaacaatggaaatataagtactgatcaaacagccggtcgtggattaacaaaaccataatcacttttattaaaaggtcagagtcatacacgattaagactggttctaattatatatgtagttaaattgatcagattattggtatgcgtcacgcccagcgcggcgccctgataacaaataaatcagaaatttatgtccatgttatccctttttatatttattattgtctacgtagaatttatggggtttgcttaaaaagattgactgaattattagactagtttagactattcaatataacgtgtccgtattatagtattcctggcaactgtgttattgtaatggcgagaaaatgatttctatgtagcagtcttgatgttgttgcccgatcaacttaatagtctctcataaccattccacctcaatctttgctctcaatattttaagattctctttatctatagggcgctgttaacttaggcgtgcacctccttgttgtatatttttacaaatagattcaaccagtttttgacatctagtttacacttctctttactacatggaaagtaatcgtcaaatccttcagttcgatccttgatgtactgcatagttctttcaatcagacttttctcaaacgaagaattgatatggtgttttagttttaggaatctacaagccattgggtaccaggttccaccgtctgttgatacgacatgttttccgtgaatcttgatcagacctgaaataaatctctctgcgataagcatgttcctctccttggatttattagctaagaaagagtgcgagaatttgcctattttctggttcgattgctgcccataaccaggagtattctgagccgacttttattaatgtctcatcaatgaggtattctgatatttttgttcttcttgttgaaacctttcgaggtttatacctttgaatccaattccaaattgcaacgtgacttctattgataatatgtaaaaaggacaatgccttggcagtatttctaagcgataagcctagaaagtacaaatacagaccatagtaaatatgctctgaagatgttctctttcttttacttaacataacagaaatagagcgtctttaagctaaagatttatcgttaagttaacagggcctaatatcatgacaactactttatatataatgtcacggctctggcaaccatgaatcgaataagtatttcattattatttttaataatgatttcaatgattttacctgcttcggcaatcatgtatgctagtgggtctactgataatagtgaggggacatcagatggtgagtttagcgagaatagtttcgcttcagatagtgggtctactgataatagtgaggggacatcagatagcgggtctaccggggatagcccagactcatcatcagatagtgggtctactgctgataatgttgatttatcaacaacgccaacggaaaataatcccactttatcaagtgaatctccgttgagtaacaatactgaaaatgtgcaaggggaggatttggccagtagcattctgaccgtacacaacgcagagcgtgctgccgttggagttccgcctctcgtgtggagcaacgatctagcctccggcgcacagtcttgggcccagaatctcgctacgacaggcgagtttgcacacgaccccaacaggcctaatggcgtgggtgagaatattgcaggctttaatccgtccatgggggtgtccgccccaggggagggacagtctctatgggtcgacgaaaagaagaattggcagggcggcgtattgacaccggagaattggtatccgaccggtcattacacacagatggtatggaaggacacacaagaggtcggttgtgggaccggcagtggcgatggtcatcctttcagcattctggtgtgccgatacagcccaccgggcaacttcatgggacaagcaccgtattaggagaacatcgttcctgtcacaatactatcacgataattaccccctttcactctgaaccaagacctcagacgcagttcctccaagcaatatgagcaatggtatagtgagattggcaagtctcaatcatttttctttttttaaaagaatttaaagaaattgaaagtgttaggatcataaagtattttttatttattaacgaaaatcgcttgcaatactaacgctttgcataataattaagtggtctggtttatttataatatttctatccgaggataatttacaagatcaataaataaatcaataagaccgagtttacagacgccaaattatgatattcacaatataaaatagtgatttattgacgttactatcggttcacccctttctatatacagaaataggatttcaaagatggatatcattataccaatttaatacttgggttataaaataaagtcaaatttgtttcacataccgtcaaaccagttacccattttagtaactatatgacatacaatcgcagctggctttaatataatcttaaatctgttataaagaaaattaggatcaattcgaggccacattgatattcatgatttatagttttatttttttggaatgatgttatattcatgcttatacaaaacttatacttttataatggtttatagcctttaagggttcgcccgggcttgatccatttaccattattgaagactctatacgatcccaacggattggggtgagttattttcgacgaattatgggttttctacggagaggaaatcaagaaactaattaaatatcttttctcttaattgtccatagatatggatttatcaagaaacatttgaccacaacctgatagttcgtcaatgttattctagaagttctatggaatctggatgcataatgtcatatagttctaatattcctttattcctcgacattttaatactgtgtataataacaacagggcaatatacaagatgcatttatcaaaatggtattctaaccttgaaattatatattctaataataagatgcaaataaataaagtttaactattttacactattaatgaaataaatatgatttatctactgatatgaatagattttttaagctatttcgatatcttcaaatacaaaaaatatattattgcataaatgagctgtattgaagaattagaaaaaaaatatatggaatttgatagtctaatgaaaacctgtcttcccaaggtggatactcagctaattgtggacattcttcagcgtttggctggtgataaaaatccgatgtataccatagaaatcttcctcgataaaaaaccagtgcttgaggagttaagaaataaaatatccacggatttggaagttatgcccgcattttatgacggaggaacacatgtagtaattgcgcatagaattgatctaaaaatgcttgaatacttttcttcagatgagaatgtttaccggattcgaggaacatatacaggacatggacaaggtgcttccatcggtccagtatttgaaagggatgatccagaggaaacgtgggatgattatgacaaaacgcattcataattattatagatagcgaatatgttttagcaatagaataaaaagatatttctaatgactcggatgataatattaatgacgaaaataatgatacaggaattgcaatttattctaataacataaataccgtgatgtcttatgactctatttttgaaacactttgggctaaagctgagataaagagaggaccatattagaataaggataaaaatacggaacaaatttaattttacttccacttaaaactaatggatcaggttgatgtccatcgaacccttataccatcagggacttaatcccaccgaacacgatacctatttgtagtaacgatatagggaagtattagatgtagggtaattcttaatcctcatctttttaaaacaatttttttatgttttcatcttcacaaatgcgatcctgcggataacgaccatttgactattctgagagtaaaggtcagataaacgatcttttggattctgttattttatattcttttttgcgcatgaatcacagtatttttcaataatggtagctccctctacagtgaatattgcttcctgagtagccgcgttaccgcaaattacacagggttttatatttccgccaacatcaacaaatgcccttatcgacgaaaacttcttatggaaagagtgcaaagacgtgactatcggattagaatttttgtcagctgtcatgtcatatatatacatttcgtacctattaagtatgtcatgatggatatcgttgatagattaccctaatcgttactataaaccgaaatatagagatttcaactagttttaaatgataagacacaaatattaatcagggtgatagaaatggaaatcatatcactttttgaacaacaatttctaaatacctagtcaattgactaagatgtacttgttagattcaacgagacaccaaatagatggtgttataaaacttgttgcacaatatattacgtgagaacccacatgatatttataattctagagcaagaaaatgactatagaaaagcaaaagtatgggaccattaaccaatcaaatagaaagggaaaatatgcgacttccactgaaaatcgtagattaatgtgggaatatattatctggccattggttttagaacttgataagaattattttacagcagaggaatatcataaaatgagaaacaaagtttcaatagaaaagaatattccaatttcaaaaatgtctggggggctagtatcgctattacttaaaggaattctcactcaagataagaagtattattcaattcattacaaattgatcccttatatgagaaaaaatgcctacttagattacgaaactgttctaagggaagtaaggtcaaaaaaataaaagtagcgatattgatcattcaacttcaatagtatattttgtattatttctgctcatattcgcttgttatcgtttccctattgtttgccttctacactgagaaggcaaagtctaccctttagttgtatattattttcccaagtttatccatggtcatttgggtaaatgaaacaagtttaatttgtatcacataccaccgaaccctcataccatacggaacttaatcttataggtctcattgcattttatataactgttaaatccgaacgttattacatgaatatccattttcaaaaactttagttaatcaattagatcaggtatttaattaatagacgttgtaaattcaataaatattttttttagaagttaaatagtattgctactgactttaacaagattgttaatttatctttctcttctaattttttgattgatgatctttttgagcagataacaatgcatcgttgttgtctctttcaattctttcatatgctgatacatttctttttcctatttctgcaagatgtttagattgtttctttgtgttatcaactacatttttgaatatttcaatattagaaaatgccatatcattgaaaattctactcattgctatggtattttctgcataattattcaccaatttcgagtacatctctggcattcttctaaagtagtcttggctattcaataattggttatttacattttgtatatatggggtagatattgattgaaaagaatcaattgtttgtttttgatattcaagatagttttctgcaacatctctagtagcttgaagtgtttgttcttgaacttgattaacggtttcagtataacgtggaatctgatttcttgcttctctaatactttcatctatacttttttttgactcatcaaaagcttgttcaagtgattcggtgttttgttctacaattctattatataatctttgattactttggtaaatattattgttatttaaagatgaagtttggtcattaatttcttttttatcgctcttagacattgtaatattatatagtttctatactatataaacacaggtatctattggtttttaataccatgaaagggcttattcatcacaaatcggctcatattgatcaatgtctatattaactagcccattacgactctgaactcatccccacggatccagagttataattatctaaacggagtttaaagagttaatatattttcgcaggtcagcatggaagatattgaggttggatgtgtcttcttattctcgccgacatatattctgctaatcctattctatgatcagaatgatcaatgatttatttgaattcgattatcctagcacgatgttagatattgttgattcatattttgagattcttaccatacagatctttttgattggaaaattctaaggttgagtttcgctagattgctcagacaacctcgctagagagttcattcagtgtcagtaaagttttgtcaatatcaggtatttaaaaccgtttgatacccttttttatatagtatggtaactaacaattattatgccacagaataccgaaattaaagaaaattattcaaataataccagtgaacgaatcaataacaataatgatttaaatgaatcagttaacagaatcataatcaatgtaaagtgaatatgtttttcaaatgaggacaaaaaataagtacactacccctgtgcctggagaagtgttgcaaaggatagatagatcttctcctgcacatgtaggtaagcttcaaaatgcagtggattttattgttcctatcggtactcccgttcttgctgcagcagacggcgtagtaacttacattaatgatgattctaatatcggaggtcctgatgcctcatactggttttataccaattttattacaatcaaacattcaaatggagagtatactcgatatgaccacctcgattacaagagttctagggttagattatatcaaaaggttcatgcaggtgaaaagatatccaaagttggaatgaccggttatacctatattccccacctacactttcaagtatatgtatacacaggatacaatatttggactgattttgaaacaatagagatcaagaattttagaaaaacattgtaaattaatctcgatataaatataacggaagaaacagaagcaaatataaattttgcattgattgtaaattaccatatccctaatttcttgatgaattattttctttcaattgcttttcaaataaagaaatatttgtttggaagggttattaataatctagttttgttaaactaattcttcagagaaaatttattgctagaaaattttcttgccttttctaggatattgtgatacgttattatttgttgaagaaccatgcagacgataaaaaacatagtgaaaatcacagctaggaaaaaagatagataacctagaaaattcataaacatagtgaaaatcacagctaggaaaaaagatagataaccttggaatttcataaaatctcatctgcactatttcatttatatttttagattctttctttttctatttagattcttaatgcatacctaatcaaccaacaattatcgtctgactaatgtggatatgaaaaaagtccgccatttcgaaaacagatagacaaggtatgcacagttttttatttttggttctgaaaagaagaaaataatataacgagaggcaaataatatccaagttttagagttcgttactatcaatttttaattttcttagaccgccctcattttgatttaggatttatcccgcatttattacagtatctagaattcgaaatatagatatatataatttattacggattcagaatattctcttttgtacatatctataaatatctacttgatgattagtaccaattttttacaacaatggtacgaacgtaggagctgaaaaatatagaataatgtttgaagaattagttaagcaatttggtgcagttagctctgaagacaataatataataaatggctactagattaatccacaagataataaagattatgctgataaaaataaaatctattggataatagtgccccacacagaagaatataaacagtaatttgtcaattttcaagactaactagagtcactgttggatcaagaatctatattaatttactttactccggttctgaatttattatcttagtgatgatgaggaagatgaggaaccagaggatgatcaatcagaggataatgaagatgaaaagtgggccactttgtaatctaaatctatttaaatcaccatatttcacagaacctatttgaataggataataaagtcgtcattacctctatgtttgttgattatctccactgtgggagttttatcccattttggcacagatttattagcacagactcctgtcactacaacctgtgattctaatgctcaaacacttaagaaaggtaacgcaggtgagattgttgttacactacaaaatctattagtagaaaaagggtatatagatagagattatgtagatggagattttggacccggtacagatgcagctgttaaacaatttcaaacagataatagtttgactgcagatggaatcgttggtcctgctacatggcaagtattatgtccaaccacagtaccattttctgatgaaacaccaggaatgatgagatgtcctgatgataggaacaggtacttcatgtccggcagaaacttcccagacccctcagccaagtattaacaaacagattaccgcacctttggatgcagccgattcaatttatagctctaataaaactatgttcttgggttcaaaaaatatatcattaaccccttatctagtgacagaggaacattcctatgaccacggaatcttaaaaggtgtagggaatgttactaacaatcagacttacataagcactcacttatctgatgaattaatccagagtacaggtaatgggacattcgagactcaagatggagaaagtattgcttggattacttctgctataggaagaccggctgatggtagttgggttttccatgaaataatattattcaacaatacgcaaagcaaatcattggctctactaaataatagcattggtttagtcaagtctactgttggcaatgaaccggattacatctggcttttagagtagagatctttttcgatgtctagcttgattatatctatcgatataatccgtctcgtggaccgatatcagcaatcctccctccgggtccaaaccattgaagattttctattaacacaatataggattaatatctaaacgaataatcataaaactggttattaaaatctgaaggaatactaaatccatgtggatatcctcatgatttccaccaaactagatacctatatatagtaacgatataatacggtataagatatagggcaatatttaattttcatctttttaaaacaattttttttctgttttcatcttcacaaatgcgatcctgcggataacgaccatttgactattctgagcaaaggtcagataaacgatcttttggattctgttattttatattcttttttgcgcatgaatcacagtatttttcaataatggtagctccctctacagtgaatattgcttcctgagtagccgcgttaccgcaaattacacagggttttatatttccgccaacatcaacaaatgcccttatcgacgaaaaattcttttccattctatgtctctattttattattatgcaattgcacttatagtatctgtttgctagatgtgagccaaatttatataaaagactattaacagagctaatgttttatactcgttggtgaatttaatttattttttctgcattagtctttttgtataaaaacagaggacaagttaattcgagcatccaacgaatttaaaaaatccattcctagacttaaaggatctttacaagttactaaattatcatttgattgaacatgacaaagagtttatcaataatatcaatatagaattggagaaattagaacatgtgaaatttgtgacggtaccgtatcctctggaactactaacactgtatgttcatcttgtactggtattagagaatctacaatgtcttcaaaagactctcttgaggatcatgtaagtggttgtattaatacagatagaaggaattgcccattgtacaagaaaccatgtcatcatgatatgtccttaaaccctaagatattaatttcaccgatttaatacgtagctcacaactacatcagtcctaataagaaatggtgttgtccagaagatgtctatataatttatttaaagattggatttgaggcgtacgaagtatggtcataattcaaaaacatttacctttattctaaaataatatcaacaaatccaaggtatgtattttacctatttatctttaatagttgaaatagaaaacaaataataaaactatgttcatagtctaaatttaacattaccctttatgctggaatcttttatagggaaccgaaacctgcatttttaaatttgaatgataatgattttattatatatgcattaaatatttaaagaaactatgagatattatgcattagtgtcaaaattattaaaacacaatacgtttatcttatttgtcatttgccttttgatggttacattgaattttcagtttaatcaagttatttttggacagattcaggaaaaactgaatcaaaatagcctagtagaattaacagctgaaaaagtagggaaatatgtatggaaaagtaatgaacttggatttaatccattattgaatctcaaatcaaatgaaaattatacatttttaattaccagtattcaaaatgacagtgcagaacatcaattaaagatagagccaagagggggaggagagcatttggcagaaagtgaagtaatagaacacggttcatcctcacaatttgcatttaatactggaattccacaaatcctaaaatattattgcgaatatcatcctcggagcatgactggaataattaatgttacttttgcaatatgaaaggtatttggatttaaccaatctgagaccaaccgaaacgactattctgggttcatggatatttatccatctaatgaatcgaaatcccatgtctgtcattatcgattcttatccttaccttgtaagatggaatcgaacggttttggattaatattttttatttcagggacttggagcctttttgagataaaatcaatatatgcttggctaaaaccaacattcgtatttgtgatagcaaagggtcaagtgatcaaataaactcaaatagtagtgctgataatacctacaatgatcaactattctatgttagcctttttttattaaactaaaataaaattttgagttagaatatttaccaagatattttattatcgtttttgtgcctgtaaatataagatttcattatttgacaatatgatgaaaacaaaaggtcaaaataaaaataagttatattagtaataaaattaaatattcacagattatcaatccattcacctgactgactgcatatagacaaacctgttaaacccatgtgaatatcctcatgatttccaccgaacattttataccatacggaacttaatcccaccaaactagatatctatttatagttactaattataccacacgatactgtggcttaaaactgtatattttgattcttggtaaaaaaagggatggttattgttgaccgtttgcgttgttgccgtcatttaggttgaatgacaatgcaacgttgttacatgatgctaatgtattgttatttgaaaaacattctgcactctcacctgtaaaactatcttgagtgatatcttggaaagaatcatttgatttcttttttgttgcaaatgctgcgttgttatctccagaaatagctactatggaaccaattaatgctgctgcaatgaacatgatcccaaatatactaactttttgattttttgttaggttgctcatttttttatcataattcatatctaaaattatccttatcatagtttagacacttcaaactgtgagattttaataatcgataaattcggtatattttaacttctcgatatttatataacaaaagtccagaaaataaatgttcagtgcccgaataagatatacagagacttttccctctctgaccaatttatagtaataaacaaatgatgagtcatattcaaaacctagaataaagatgatttcatgtcaatcataatttaataaacctattgtagaattagtttatccttagcatattcttaggtatctacttatttgcacgacattactttggcatctaactcagtaaacgctcaagcaaattgtttataaaactgatacttcgtatggcttgtgcgttggtcggcattattgtaaactcccattatcatgaataaattctattaaccgattgataatgagaaattattttaagcaataattaagaggattcatattatcaccaaatttctatcagataactttcgtcccataacaaagttcctagggtatctgataattctagaggttcttaatataatgaaatatatcttattacaccgatatcggttgcaagccccttgggaccagtctattaatagtataactttatcataaatagcaaacaataagaaactacttagttaaaaagtcaatttattgcatagaattcagatgcatcgtttatcatttatatacagtggttaaattcagtcaaatttgtttcacgtaccaccggacccctataccatacggaacccaataccaccgaattaacaaaacattatatccctactatttcatgaagaatttattttgttaaaaagtcaatagaatagtagatgcagagttcggtgtgtgctcaatgtaagtgctctcctgaaatttgttcgagtattaataaagtgcaaaaactgtataatggaaaactgttgttgtacgccaatacacacaagccaattcaacatctttaagaatttaagttatgtcccacaaatatttcaaaatattaaaaaagtgtttgtagccgcattggggattgaaattttgtgcataatttcagcggaaattggagaaaatattggtctttctatttttggttttaatttgctaggtatcgttatcgcatatttcataggatttgcaatagctggcttttcaactttcatgactattttgggaagatgggactttgatgataatgataacataaaaaaagcacacggttgctgctcttttcttgaagggaattccagtaaaggattcctatttaatttgaaatttacattcttaaattttggaaaaggattagcacaattcatataccatcggaaaaatccacaaatgaaatctattctcaaaacaagtattgtaatattaattacagcagaaagtgcatgtatattgacggctgaaaccgtgaccttggtattctatcaatattctatgttcttggctatcccattggctttactaataggaacatttacattaactttagtagaatccgcaaggaaaattagaaaaaccagtgacaccgatagtgattgtgagtgtgaaaatttagacaatccggatacctccttatcatcctcgattacacaatccgaatttctaccgctatctgaatttaagagattgaagaaagaattttaatcgtttttcaataactctaattttcagagaaacctctcctaactttttcgtatttcttgagaggtagtgtttttaaatcaattttcaaataataatttcatgaccgtattaactcttgaggaaaactaagaatggttggtaacaaggatagtgacggtgggattaaaaaaccaattagactaggtttacgacccaatcttaaccagttcttaatccttgttttagttaatgcgttcgtaggttcgatgataggattggagcaaaccgtagttccacttattggggctaacgaatttggtattcaatcagatgcattgattgtatcttttattgcaagctttggattagtaaaagcaattctaaatcttttcgcgggtaaaatatcagacaaatggggtagaaaaaacgtattaattttaggatggttgtttggaataccagttcctatcatattgcttctagcaccagattggaactggataataattgccaatgtatttcttggaattaaccaaggactgacatggtccatgactgtcaacatgaagattgaccttgtcggaaaagaaaaaagagggtttgcattaggattcaatgaattttctggatactttgctgtagctgttgttggttttgtaacgggttatctagcagccatatatgggctaaaaccttatccattttatcttgggattgtatttgctattgcaggatttttgatatcctggttaattgtgaaggatacaaaaaggtttactctcttggaaatagaaaatcatgatgctcttgtctcggaaaataaagataaacatgaaactaaaggggatttgagttttagacgtgtatttattcaaacctcctggaaaaaccgctctttacttgccatcagtcaagccggattagttaataatttgatatttggtgtttcttggggattgttcactctttatttttcttcttttgccttaactacaaatgatattgggctattaaaagcactgcaccctggcatatggggaattttacaacttgtcacaggttcaataagcgataaagtaggaagaaaaattctcatctttcctggaatgtttatacaatcgataggaatctggataattttatattctcaagcgtttcctggatgggtaactggaatgtctctattgggcgttggaaccgccatggtataccctagtctgcttgcagcaattagtgataatgcacatccaagctggcgagcaacatcgcttggagtttatagattttggagagacataggatttgtatttggtgcgattggaataggatttatctcggatttatttaatatgttattcgcaattcaagtagtcgcatggattggattggcttctggcattgtagttgttttcttgatgaaagagaccaaaaatagatattaactaacttctagattgtaacctccatctaaatacaattttaaatattaatgaaacaactattgaccgtatgacagttgcaaatagtgacagtaatgataataacaagaataataatttacgaatcacgtcagatgagctaaagaaaaaaatagacaagggggaggacatttttttacttgacgtaagaaatcaacacgaacatgatgcttggagtgtgtcttatgatagatatcaaaataccccggtaattccggttgatactataactacaaatgcatctcttaaacagattccaaaagataaggaaatcattacattttgtactcatggacaaaggtcatcaaatgccgcgaaaatgctttccgaattagggtatacggttaaaactatcgaagggggaatggatggttggagcactatatatgatactgcaattatggataccaattcagacattttaagaatttggcaaataagacgtgtatcaaaagggtgtatgagttatgtagttgcatcattgaaagacaagaaagcaacaattatcgatgctacttgtacaatcgaaacagtcctcaaagacatactagaagaaaatggactaaaaataattagagttatcgacactcacatgcatgccgaccatttgtcaggttcaacaagaattgctagtaaatatggagccgagatttcgattagctcacttgaaaaatacgatactaaaaatcgggactctgaaaagaacttcaaacctacgctaattcaagatggagatgaattagaaattggggatgggatttgcttagaagctattaatactccaggtcacacagatggcagtatatcatttaaactggaaattagagggacgagtgaattgaaaacagaaaatgatgtaagtaattcaaaatactttctttttagtggagatacaatttttgtaaatggagtaggaagacctgacctccataaaaagtcagaagagtacgcacagaaactttatcagacttatcggcaaaaattatttaatttacctgatatgactattatacttccagctcactatagttcaagctttaaacatgcaaaaccagtttttgatacaattgcatctatcaaacgcaaactaaattctattaccaaatccgaaaaagattttctgaattatgttgcttcaaatatcccgacccaaccaatgaattatgaacaaattatatccataaataagaatttgacccattgtgatagggtagagcaacaggatttagaattgggtcctaattcctgtggtatcgtacatagcaggatagatacaatgcgataattttgattaattggctaatcatattatttctcacaccaggaaaccttcctttccgacccatttggatatcctcatgatttccaacgaactcttatgctgtacgggaattaatctcacagaaatctctgaattttctttacatattaaaagaaattgggttcattatttgacttgtcattgagacttaataaaggtcgaatacaagatgtaacttttttaataatttgttatcaatgttattaggtaatgtgataagaacatatgataaaatgttcgtcgtgtggtaaattatttacggcaaaggaagacgagaccgtatgtgataaatgtttcaaagaacttgagaatataaaataaacagttttgatccattctctgaatgtatacagtctccactcttaatcatcataatgtttttaacttttctttttcttttttgaagtattactactgccttcttgttttttctggattgatcccttatctttcgtgctgattcctctgatttgccttgtttcttcagatccactacaccttcgtcaaatgatctctttttagtccctccacctttcttactcatttttattggcatttggtaactccatgaaattaaataaatataaagattactaagaagtacgttcaccaaattttggacaggaaattcatcatcaacaaacactagtattatgtatattctaaacattagtaaacttttcagttagtttgtttatttctgatattctatcgctaagtgtagctatatgggataaatactatattaaaaataataagccgtgagatcagttggctattgggcctcccaagaacaatattccttgcaagatttaatcacgtttgtaattgaagcagagaaaggcggctttacttcaactatgactagtgatcattttcatccttggtggaatgacggcggatttggaaattttacttggatatggcttacagcagctgcagaaaggacaaaaaatatgcaatttgttactggagttacttctcccgtttacagatacaatcctgcaataatagcgcaagcatttgcatcacttgatacattgtatccacaccgaattagcttaggagttggtacaggagaagccatgaatgaggcttccgtaggatttgaatggccctctccagaaactagattgaatagaacaatagaggcaattgaaataataaataatctctggaaaaaagatcaacaacctcagtctctacgagatgaagaaactaaatttagcattggcaatacacatatcgataaagatggatttttgacctatgatggtcaatattttaagataaaatcggctaaactttatactcctccttcatacctcatcccgttgtacatggctgcatcaggacctgaggctattacagctgccgctacttatacatatggattgatcacaacatcaaagcctaataattcaaaagaaatatttgataaattcgatcaggctgctaaagccgcaggtaaagatccaactaaacttgagaaaataggaaaacccaaaatatcctattctgaggattacgataaggcattcaaatccacatatttttggagagcaagcagtattgaaaatgtatttgatactgccattaatgatccaagaaaattacaagaaaaagcattagaagaagtatcggatgaaaagttaaaaaaatctactctaatagtaacatctgtagaagatttgataaaaccacttgaagaatactttaaaaccggtttcactcaaatatatttacatagcactagtcctgacgaaattgattttgtacaacaattatgcaaaaaagtattacctcattttaaagaagaaaaacaattttagaatatcagaaagttcaagtgatgatttaataactgcataaagccaggaggcgctgttaacttaggcgtttggcacctccttgttgtgtatttttacaaatagattcaaccagtttttgacatctagtttacacttctctttactacatggaaagtaatcgtcaaatccttcagttcgatccttgatgtactgcatagttctttcaatcagacttttctcaaacgaagaattgatatggtgttttagttttaggaatctacaagccattgggtaccaggttccaccgtctgttgatacgacatgttttccgtgaatcttgatcagacctgaaataaatctctctgcgataagcatgttcctctccttggatttattagctaagaaagagtgcgagaatttgcctattttctggttcgattgctgcccataaccaggagtattctgagccgacttttattaatgtctcatcaatgaggtattctgatatttttgttcttcttgttgaaacctttcgaggtttatacctttgaatccaattccaaattgcaacgtgacttctattgataatatgtaaaaaggacaatgccttggcagtatttctaagcgataagcctagaaagtacaaataaagaccatagtaaatatgctctgaagatgttttagttcttttacttaacataacagaaatagagcgtctttaagctaaagatttatcgttaagttaacagggcctgattctttgacaatctctttatatttctctttattaaccgtccaattagaattatgtctccaatccaacgtaattccgcctagaagattttctttaccctttagaaactttttttcaatattcattgtgtgatagtttttttcaagataggcggtaatttcattcaacatacgagagttgattgatagcatttcagggtcaaaaagtgaaaccttatctttaatagtgatatcttctgtagatacttttttattttcatttagaatatttttattatacttaatttgttgcctatcatctaaaacaaacatttctaaacctaaaatacaagacaatatttttgcaaattgtttaatttttggataaatgaaatcaaaatctttgcttgttataattcctattgggacagttaaagaaatctcacagagtatgtcttcaattgcgcgtagaataaaatcggaactattgtaattatattttataccagatgtaggacatagagttccatcaaaatccgatagtatagcagccaccctttccaatcttatttctatggattattatctactgaaatcataaaaagccttgtaatagtctaatatagatccaaataatacttttaggggtcatttattttgggtaaggtcgttactataattggtagcgtgttcggtggaaattatgaggataaccacaggagtctaagcggcccattcaagatgtgaatcaacaatcaattttagcctgacggagtaaaatacaatatggtattactttttacttacataaaaatattaaagggtcgaccgttggtctgatttatcaactattctttttccctccagacctatgctactttagaaaagcggctcatttccttttacatagattgtataatgatcaataccatctacttcttcaggcattgcaaagagtccaaaccctgaggacaaatctattgagaatggagaattatcagctgggggaagtgattcaactaaaggtctaccttgagcaattccaagaaaagaatcatttttgtcaaaaaggaccgcatatattgatatagaagactgctcatttgtagaattatttgtgactgttcctgttatttgatttgattcgccgcggaatctaagatcggttatagtaagattttcacttttgcctatggtagcttcaggagtagcagtagtagccgtggtttggtttgtagttgtatcaagatttgtggcagtatcaagtggttgtccatatgcaagaggtattgctagggtgaaaacaagaatagtaaatacaccggaaaggatttctttcattgccctctctaattagaggatattaattaaattttcgttgtaattgaatcaaaattagtaaatatttggattaataagtccgccttaataggtcgattggagaatgagtataatggtaacaaaaaaattaatcattatcatggtcagacccttctattttcctggatcggtgggattaagtcccctatggtataggggttcggtcaatttgttcaaactaaagaaactaactaattttcaaaatgcatggatgtttcaaaaaagttaacttgcaacttgtcccttatgaacagtaataatccattctcaccagtattcaaaaggttggtaattcaacaagtagaataaaactagatttttgtcaaacttctagaaagaaattattaatcatccaaagcatcaacttttctcgaatttgtcataatttacaaagtattataattgaatcagaaactttaaaaacatttgttctgaaggggcatttatgataagtaagtcaattgctttaacaacaatcgcatcaattgtttttattttaatttggagttccttgcctgtcaattcatttggagtacctcccgacccgggttatagacatcccaaagcgaattgcgatactgtatatggaaccgcatacataaaatgctgttgggacactaaaccagttggtggggtaatgtactgtcaagaatgcaaatctactggaaatccaaaagagccaactgaaatggaatgcaaagaaaaggaactgcaaacgacattagaactaccgccgacaccacctaagccatcaggcccggcttcgcccttacaagatgatggagtgctcgaacaatcctcatcaccatctaattcagacaatcaaggacaaaaagatgaatcagatgaaaaagaaaatagtctaagagctaattcaccaactccaccagaatgtccaaaacaaggaccgatacctccaaactgtacaattaaaccatattaattcttataaattatacaatggcagtcaatctctttgatcttatatggagtattgacctcaagatagtacatatcagagtaccttgcaatactcattcgcccataactagaataattgcatttagtggtttaaaaaaggtcatggtttcagagaatcaaaaactgtgtaaaaaagtctccgaacgttgcaaagaaaaataaaatgaggtctgaactttgtattgactattaatcattatttcaaattataataaatctaatcctacaaattattatttatattcatggttttgatatcatgctatcaatagagtaatgtttatattctgctatcatgatagcagaatatgaaaaaattaaatcaaataaagaatatacatcgaacaattgctaaaaagactgtttgtaaggaggccacacaacaaaaatgaataaccagatgctgatgatcgcaaccgtatcgattcttgttgtatcagtttatagttcaacctctttatacacagcagatgcgatgcccgtatggaggcctggtggtgaaggaataaaatgtgcagataatgatgatggtgaaactgtaagctgttgtaaacgtgtaacacctcgtggttcgtatgtttctgaaagatattgtactacttgcaaagatactgaaccgccaagtcagtgttcgccaagagaaatactaatggagtaacaatagaccattcctcattccttttttgacaaattttggtatcaaaaacacataagtcataaagaatatagtcacaatcaactacgatagataacaggattagccttgaaaaaatcataatattatatgccaaaatatctaaagggatctcaatattacatttttaatcattattgtttattactaatatatagtatcctactgaaggatagaaagttgaaactttacaaatgacaaatttcattactaattcataatataagtcaaattgtactttttggaacttacatcatctaataccagaatgatgaaaagattaaactttcagatcctagctacatgagaatgggctcgtacttgctcctataatacatacgctatcgcagattccaggatttagtctagatacatgttctaacgttagcaaaataaaaaatagtattttcgtatttttggatataattggtattatatatgaatatcctcgaatgagaaaaggatatgagaatagctaactaattctaaggatcatggaatagcaaaaacattagtcaaacttgagatgagatattctaaataatctttaccttactcgactttgattgttcctggtctaaataggttcggtagtatgagaaacaaatttgactcgattttatcaccctatttcaaaaaaaataatatgacaagttgtgagtattgctttaagtatgcctatggatcatcagaaaaacaaaaaagagttttagtaaaatagtagtttgattgctactacttggttagacttttaccacttcctatcggttggttagcatttgggttaggtggattatagggacaacctaaagctgaacaggtgacaactccttcaggtttttcgcttccatcaagtggcacacaaatcgggttagggctattggggtcgtatccatacccaggggtacaacctaaggttactaaatccggctctgtattaccacttcctatcggttggttagcatttgggttaggtggattatagggacaacctaaagctgaacaggtgacaactccttcaggtttttcgcttccatcaagtggcacacaaatcgggttagggctattggggtcgtatccatacccaggggtacaacctaaggttattaatgtcgaattgttgttggctataggtaacttatttcctatagatgaattgtctgaggtactcgaattgttttgtacttcacctgtggattcttcacctgtggattcttcacctgtggattcttcacctgtggattcttcacctgtggattcttcacctgtggattcttcacctgtggattcttcacctgtggattcttcaccttgttgaggaatagcagaaccataaactgttttttctgtatccatcgaataagaagataataacgcgacagtgaccatggaagttattaatgcaaatagcatggcgatcaggaaaatgggtttattagccaattttattcagatattgattctcagagtattataaatatgtttaagagtagataatgataaggttttccttgcaatcagttgattttcttataatcttttttaatatgccgacagtttagaattactttaactagattatatgataaatagttactaaagttggtatctggttcggtggggttaagttctgtatagcctaagggttcggtgggaagagtcacagatctgtgagtaattcgacaataagtaagatcaattatttgggatttccagactctttacctcattccagtatttctcaaacaagatctgctgaactaacactttatttgtatcattagtgaatgaacctaccaattcattattcttatcttgttggatttgaagaacaaatttgctgtcaaaacatattatcatttcatcaaattctcctagtttatttgaatactccagttggaccaaactccttccatttttacgatttattacttcgatttgattttgtatatggctatcagcgttatctacaaggattttactcaccacattatttcgtaatttagaactcaaattgatcatcatgtttgaatcgaaaatgtgtttaaaaatctcataattagagaatattgttaactcttgtttggtctggtcaacgagaaaattaatctcgttttgaatattcttaatcccaggtaaggatttgtcgtatcgtttagtattttgatattccaactctgtgattcgcgatgataaaggtttagccatattccacaaatcattatagatacacatttgtttttcaaccaatggctttgaattgctaaagaatgtttgtaaaagtctgtcgttgtctttatcttgcattataactaccatgtataatctttcatcgtataatccaaaattacctctcaatccctccaagtgtctaatttctaagaaatcgagtgtttttaggaaatctatattctcagaatttgcatcaactaacaatttgcaggatatccctctttcttttaccatcttttgtttaatgaattccaatgtttcaacataatattttgcagcccatttgcaaatttccgcatcccagtaagcacaagcgcttttttcacatctgtcagttcccgcatataaaatctctaggacctgattttgatcaaataccacatctgaaatttcaggacttttaaaattagattccattaattggttaaagagtaaatgatccaccaaattattaactttaatatttgttaaatacctcgcggtttctatcagcagtattttgtcaaacgcatgttcattggcactatgattcaattagaacatcttaacttaattctatggaagtagtttcatctcctcctgtggaaatattaacagatctgagagtaattcgcttctatcagccatttataagatctatcctttaacggtcctacatacggttttaattgctcctgccaaattaacaaaacttcagaagcatgtcatagatttatttatattattatagcattatgaccatatgattaactctactctcttaatattggtgggaattattagcatttcagtttcttttaacaccgagattttatttacagtaaatgcacagccgtcaatagaaaactcttcaaatttaacttctcgaaataatcctagtgtaacgttaggtgaaatgttaaacggaacaaacatgcaaggaaataattctaatgagtcagacagtaatttaggattaatctaacaattataaatttacctgatatagacgtctagatattatagcagaacaaatagatgagacgagtatgaaaaatcatactagtttgcaacctttttgaaaactttgtaaactattttgtatttattataacttcaatgaccggataaatatgagaacggaaaattacgcaaatgcgaactgagtaggatttgcggcaaaaatgacataaactacataattaaattacctaaaccaaatccaacaacgggttttaatactttagcttattccaaaagatcagattgttatgatttgagacccatttgcaattttggcattggtgtattttctatcacttttttcatgaaatagaatatatctaaaagtatttgtcgccaaccaattcttttcagttactgaattttcatataatgaattgactctctcttcaaaagtgagggaaagatctaatttgatatgatctaaaaacatttttaatagtttaggagattgtcttctagtctcttttgattttaacgccatcataaaattttcataaggagacaaattccctaaacaataatcattgaaaatttgttcactaaaagtagtttttagatgacattctacggctgctgccattgcctttggcttatttatagattcgttacagatctgatgcgggttcggtggtatgtgaaacacatttgaccttattttttgactcaagtattaaattgagataagaatatctgctttgaaatactattttttggatataggatggaatagatcaatagtaacaccaataaatcactattttacatcacaaatatcataatttatggttttgtaaattccgtctgatcgatatatttatggatcttgtaaattttcattataagatttactatctataaactggaccaattaattttactcaaaagtttcaattcgtaaggaatgttcatatattaaataaaataatcttttcgctcataatactcttaaattcctttattctttcaaaaaaatgaaagatgatcaagtctctatcctattcactatttattgctcatattgtttggaaaaaacgttatccttggtttagtacaaagtggtaaatgatactttgcgtggtacaaacataaccttcctaatacgcactctgtccaatctggttgcctgatggggtatactgacagaccagaatgtccttaccagtatcactggccatcccgcaaccaacctcagtagtggatttccagaccatctgcgtgtaatgaccgaactgcataaaattatcattagtaattggttggccatcatatgaattcttttcatcgacccaggtttgtaccatcttagatagatctatctcatttggatttgagtttattcgggacaattgtgcaatgttttcaccataactggtgtcaggtgagtgttcaaacttgccttgtgcaagcaactggtcagcccaactctgtgcgttggaggctaagctgctgctccacgaaagggctggaacattaactgcagcacgctcctggttatggatattcaggatggtgttttcaagatccacatcctgcagttgttcatttccggtactgttaataacagtaggatcgatcggtaatgcgtcactactctcagtagatgtaatagggaatgtgccatcattatcggtagacccgctatctgaagcatcactattatcttcggtagacccgctatctgaagcgaacgaattctcgctaaacccgctatctgaagcatcactattatccacggtagacccgctaacatacatgattgctgaagcaggcaaaaccattgatatcattattaaaaatattaatgaaatatttatttgattcacagttgccattgccgtgactttacatataaattcattgttacacggctaggtcaagtagaaaattacaaatgtatcaaaatttgagttttcttaccattatcttattaagcactagtttctttttagtttggctatcttgattgtcccattttcggatttggtcaagtgtttgcttaggatgaggtcataaattctatgacggtagagatggttcacaggtggcgtacaacgctgcccaatgattacacatatgttattaacaaagcctcagatacaatatcggtctttggagtgatacagtaaccatttgaagacatcataggttcgagtaacaacatagataaccagttcaacaaaattcaggaaacaatgcaagagggcaatcagagaataccttgacgaaaacatcttttaaggacaatctaccagtcaagagaatagtgttgtatcctgaacatgtttagtggtgaaaaatgtaaagtaaagataatcacgagttttcatagcaagtggtcacacattgactttcattttctttccaatagattaatgaataagaattacattatctctgattgtattctaaatacgttactaaaattggtatctggttcggtggaactcttgaggatatccacatgggtttgataaagtatttttttattttgatatcataatcagtttgtaatctatttgtaataggaagtaataaatttttaatgcgggctcaatgggactaataacaaatttgactatttaaatggcccaatcctaacgcaaagttagtatggatacaaacaaaatatgcgtgatagatcgataaccgtaagaaagaatgtcctaatttctataaaaattttatatcttcataaaacacgacatttctgaagtttggattataggtgcatttctatatccataaatgattcacaaatctttctatcttatgcaccagttaatatcttaatattcatcagtgactttcgaatcttccaagcatggataagttcttgaatggatattttaatataaactcaatgcagaaattgctccatgaattaactagttttagcagtttagacccgtattgatagtcattttccgataattcttgattttgtctattaacatcaaaaatttttatatcaatctacatatttgaaaatatgatcgggtccgtaataacagcagatagcataagtgaattacgtgctataagtggaaaaataattcaagattcatttaaattaaatgtgacagctattgtaaaaggtcatacctccataggagatggtggtggaggtaattatatgtggaatccttcttctacaaaagataataatggaacggtcattgaacccactgatcgatctgttgtaattggtgggattcctaaagaacttgaagtgaatcaatttagtgttagttcaatgaaagccgtgggtatgttcgtgacgaaactggagtatctataaatgaaacccttttgcttaggcttagtgctggcagcgttcatactcgttccaactacagcaatgggacaagttgtgaacatgactgcagtaaacaatacgcttgcgaattctactatgggtaccaatacaacgacgaccaactcgaagtgctcgtcgaaccagatcgacatcggcggcacgtgcacgagcaaggccgaggtgtcgaagcagatcatctcgatcacgcagggcgtcatgcagaaggaggacgccaagggggtgctcctgcgcgtcgacgtcgataacggcaccgtcgtcaagactggtctcggggattcccaggagggagtgccggcgacaccggacatgaagttccgtcccggctcgatggcgatccccatgctcgcgactctggtgctgcagctgcaggagcagggcaagctcagcctcgacgacaccctgtcgaagtggttcccgcagtaccccaacgccgacaaggtgacgctgcggatgctctcgagcgtcacctcaggctaccccgactacatccaggagaacccgcccttccaggcggcgcagctcgcggagccgttccgccactggacggacgacgagctgctgcagtacgcgttcgcgcagccgatcgtctgcgacccgggcgcatgcttccactacgcgcacaccaacttcatcatcctcggcaacgttgtcgagaagatcaccgggaagtcgatcaccgagctcttgcagcagaagttcctcggtccgctcgggctcaccgaaacgaatatcacgaagctcccggccatcccttcacccgcactccacgcgtacacgtcggagcgcggtgtctacgaggagtcgacgggatggagcccgtcgtggggcctcggcgacggactcatcatgacgtcgacgctgcgcgacatgaccacgctcatcaaggcggtcggcaccggcaagatgctctcgaaggagtcagcgagcgagcaggtcgaggatctgtcgaagggcctgccgggtgcgcctgggcagatcggctacggactcggggtcgccgtcggtaatgggtgggtgttgcagaacccggtcttcaacggatacgaggggattgccgcgtacctgccgtcgcagcagctctcgatcgtgatcgacaacacgcacggcccgaacgccgcggagggcacgagcatcgccaccgacatcttcaaggcactcgctgcgtacctggcccccacatcgctaccataaatagtatcgggttcggtgggacgagtgtgcaatttcatacgagtttgtaattgggaagatgtaggaatatcataattcttggaagaataaatatcaaagtacatatgcgctaaatccaaccacctgtttgaaatatgccatcaaaatgattgataaatagcaatgtctacaaaatttacatatgccagaacttaacagtatttctgaattaaagaaactgctcgatgcaaattgcaaaatagaaaaagtggaaccaccagtctatgcttctgatgcagaggtcaatatagtaaaagtatccatagtatgtccagatggtaaatctcacacaatcaaggcatacaaagaagaagcatccacattaagagaattcataagaacacacaaataaattccatttaattgaaaattttgttttctgacagtttcactaatactgtagtggatactgtcgaaagacaaattattgttgatatataaaatggcagtagtttattgataatttaaacaatcggaaatagtttatcctttttgcattttcatccgttaccaaaacaagtagcgtgttcggtggaaatggagatggtgagtctataatataatgaggtgttaaaagatggggcgcttgtatgttaaggctcataatgttggtgggtttttatacgtgggcttttcatatatccaaaagtgtaaaccattgttaggatgatatgattctaatgggttaggttttgaattctctaccaatatgtagaatctacttctatcaaacaatttcttgatttgtttcttttgaacctttgatatactaccagtgtaaaactctaacccgtcgcccttattccagtaaaagtgtaaattatatacgttcttttcacccccgagtattttaaaaatttttctggttagctctatttgttgggttttggttatggtcatttgtctagtatcatgacaattaggctagcttgtaattcaagtttctcgggttgtttgtgggggtcgcggtcgctcatgatgatgatattatcccaactactttaatcattacctctactatgtgtttagacccgtatactatgcgggttaggtgtatctgaaacaaatttgactctattccatctcttgcaccatgacttatattgaattaattcagcatattgttaccataaattcgatgtttgggtccgatagtatctagacccctctactctttatactcaatggttattctgtgggattaagttccgtatggtataagggttcggtggaattcatttgaatatttaaataagtctaaaatccatcaagatttaaatcaacgtttttttatttggtaatgtattgtagctcaacaaaataagcataaattattcgggaatcaagaccaataaagctgttgttctaactacacatgagatctatttattaagttaatccaatggggatactacgctaggattgcttcacaattgaatttttaacctttcttttagtttacaatgctccttgggtgaaagttatacatttttgtgaagttctataatgtatatatgaatagtgcctacggaaatgatttttccctttcaaaaaaagaaggaggaatggaatgaagtttcacgctgagaaaaaaggtatacgggttttaggtatagccgaaagtttcaaaaaaactagtatttgctctacacttgcaggaatagtaatgcgtcgtgatcttgtaattgacggtatgatttttggaaatgctacgattgaaggaaatgattcgacaaagaacatattgtctatgtgtaggtcattgaagagaaacgacatcaattgcataatgcttgatggccttgttataagcatgtacaatattatcgatggtaaagaacttcaagagagcaccgatgttccagttatagcaataactttcaaacactcggaaggactagaaggtgccataaatcatcattttcctaatgactccaatatgaaattagaacaatatcataaactaggccagcgagacaaaattctactaaagaccggtaagatcctattcatacgatactggggaattagtttaaaagaagcattgatgatcgttaattcctttactctccaaggttcaattcctgagccaattagaatagcgaaaattgctgcacgtgcatatatacaaaacaaacaatccagacttggttgatgtctaacttggagcagatagtcgcataattcttctaattaggttgcccataagaattatttttcaaacggaatcagacacctatcaaatttgatttaattttgtttaggttcaaaataaagtaatcattgtaatccacatggaagatgtttatgggaataacaaataactccatttgtgtattcatctttgtacataagaaatcaaaaaagtatgaaaattattttggcatcaaatacacaataattgtatttcaggtattgagatgatcatgttattatttcttaatctgagatagatctcttcagaaacattggctgaagaatattatcttattttttactactctcatctcttggtttttcgttatctaaaatctaaaatgttaacttttattatcaaaataaatgtcaatttacctacataacaccatgttaataggtacctatttaacatatattctttaatttgaaacatgacacatgtagcaaaaataacagaaatagtaggctcatcggacaagagctgggaggatgctgttcaagtagcattaactgaagcgacaaaaacaattcgcggcataactggaattgagttaaccgatatgacagctaaggtggatccaaataccggaaaaataactgaatatcattctacggtaaagatagccttcggggtggaacactcctaaggattgcgatttccaaactctttacctcattccagtaatttttgaacatcaactcttgaactgttgcactgtaatcttcatttgagaaagtggcaatttaattactattctaattatatcgaatatttattaaaataaattcttacaattatagtcgcgggtctatagttcctaaatatttcttcattagtctcgatttattctgtccaggcagtttttctctccaatacgcgtaataatacggaccatgactcagcgatttacatttattgatcttttcttttccacatcgaatacattcttctcggatggtatagttttttggtaattgattgactcttgttaggtttgaatatgatggatccttactaacatcaggtataaagaaattggatgtaattttcttgttaactctcaaaatgttttcttcctgttctttagttatatgaaaaatactatcttgatctggaaattgctcagaaatatgtttatgtatgttaaaaccgtccggttcaagtcgttcatctaaatataacaaaaaacatttcaacgttttagaattgtagatagatttttttaatgattgaaatttttcgtcttggtataatttcttcttgtaattgtaataagtcgatcgggatatcggagtagataatatcgtatttagtaaatataatgattgtctctctgtcaaactatgacattcacaccttctagtcagatgtagtatttgatcaatcctatccatcgggtataccttgtttgtggaattatattaattgcatcatataacaagaaaaaaaatacttgatttcatctattttgagacagtttttgtatacgacatcgataccataaacaagtgtaattagtaaaataaaatgaaaaaaatgatgttttaaccatattaacttcaatacgattaaaactctgttaaagtgattgcttggcttgatatgattttttaagtgaataatgtttaacatatcttagtcagataattgcaattacagcttaaatcagatgtaataatatttgtgtattatcatttagaacgggttgaaatctactatatttcgatttatagtaacgattagagcaatctatcaacgatattcatcatgacatacttaatagatacgaaatgtatatatatgatatgacaagcgaaaaaaattctaatcctataatgatgtctttacattctcttcataaggctattgcagccaagaaaaatgaaaaataaacaagtggctattttaataagtaataaaatttctgatgtcttgattcaaattaataaggtaattgataattaaataatgcaaataaccggtaatgacgaattaagaagatactcgttagatagaaatgatattttagtatctacaaaattaagtaatgaagaggaactatttaacaatgaaacaagcgaatctgctatagataggtttcctagttctctttttaacaaaaaagtaagtttattgaatgaagactttgtgggttttatgatgggaataacagataccgagataactatatttggggattatgatcaaagatttgacgttcccatatctaaagtcagggaagttaacaataatctagtccttgatatggaatggaccgagtttaaatcatatagctcagatgcttcttacttcaagtcacagtaattgagggaaaaagtttcatccaacccgaattgatatgaaaactattactgaattctgtatcacgctttgctgaaacgtcaaggctcccaagaatttttcggacacatttgcgataatctttatctgtgaacatacttggaaataaataactaatacatagtgctaatacaacatattcggtggtatgtgaaacaaatttgacttaaattattcaccttttttctatgaataataaaataatcaattaacatacatattccaaatttgtgaatccaaatcatctcaatgattgattaagtatccaatataccatcaaaaattgcttgtcaatcttcattacggctgtgttgattggttctgcaatagcctttggagaactggttgcgaaggtcaattgataatgatcttcagtattcaactttcgtccttattaaaaactaccacctggacattcacagtgtggaaatagacatttaccatcatattgattggtggatgagacattttatcaagagctgatttataaaatatttctaaaactcgatctcaattgtttcaaaatctgtccaaatattatatcctgtgtatacatatacttgaaagtgtaaatgcgggatataggtatatccagtcattccaattttagatatctcttcaccaactctaaccttttgatttaatttgaccttagagctcttgaaatcaagatggtcatatctagaatattctccatttgaatgtttgattgtaataaaattagtgtaaaaccagtatgatgcatcaggacctccaacattagagtcatctttgatgtgtgttacaataccgtttgctgcagcaagaacgggtgtacctataggagcaataaaatccaccgcgttctgaagcttacccacatgagcaggagaagatctatctattctttgcaacaattccctagggatgggtattgtgtatacgttttttgcgctcatataaaataattgttcactttacatcgattatgatttaataaactataataataccataactggattaatccaacccaatgtcatcacatattctaaagatatcactacggtctatcaatttatcaagatgaagtacaataaaaaatccgaacttaaattgatcggattaatagacacgttacggctgtgtattatttcttatttcgttgttaatgatttgtggactttgtggtagtagtggtagatgcgtttacgtttgaactggctgctgcatctttaacttctgctgctatttgtcttgaattttgttcaaatactcttgctgtgtttactcccatgtttgaaatgtgtcttgaaacgtcttttgtttgttgtaggtactggtttccaagcatcaagggttgagaaaacaacgttatttgaaagtcttatggttgataccgtgttgtctgcaacattatttacaaatcttgtatatgcattaattgctgcctcaggagaatagaagttggtaactaatccattgtagatctcattgtatggtctccatgctgattggagtgaattaacaacttctttttgagaatcaagatattcttctgaaatctcttttgcggtttgtagtgattgctcttgataactatttacactgtcagtaattcgtggaatttgttttcttgattcatctattgattttttgatattatctttagtttcatcaaatgattggttaacggattcttggaaatcattgttattatttgaataattttggttagtttctattttctttgacatactatctattagatatcatactatataaacaccggtatcaaacggtttttaatgcctaaaattgacaaagcatgactacaattggtgaaatgattaaaaaatgctatacatggctaagatttgtatctaatcactgataaatcatctcttttttcaattatgttaatcatttgttataatttttatatatagttactataaattggtttcgggttcgttggaaatcatgaggatatctacatgtgtttaaatctgtcacaaaattgaatcaccccatgtgaaaatagtgcataggaaaatataatgtctaatgttttctcttggatatctggaggaaaaaatatactattgcaatgatttcaaatctacccgcaatcatattaaaaataagagatatttgagaaatattactcatagttggagaggttatgccagtggtaatccctgttgttgtcaatgcagaaaccgattcaaaaagcgaattcaaaaaacccttctgctcaacaacccataatataatggcggtagcaaaagatacaacaacaaataaacctataattagtaaggcctctctaaaagttttttcttcctttatcttttcagattttggctcatacctgttatggacttgattaatataccgcgatgaaaccccagatattgatttagttgtagcatctgcgacaaattttttttttgttattttctgcactatttggagaattcttcctaccttaatacccccagccatcgaaaaagccgtaccaccaattagcattattattatcaacaaaatcttaccttcgtctgataacacagacatctcaatgaactgaaagccagtgttagttgaggcgcttatgacctgaaacatggcaaacatcggcttggaggaaaagtctgttgatataatcaaaaagtaaaaaacaacaattgaaactgcgatgatggccaaaaatgtgtaaatttcgggtcgcatctttgttgtgtgcatttctttactaaaaatagcgtagtgaaatgcgaatggaagagcagagataatcattccggccatgagaacaaacatctgggcgttgtcctgaatgttgagcgctgtggaacttggaacgaaacctcctccagtaatggcactaaatatgagcgaaaggttgtagatagcgctctcatacccaaataaatagagcagagtagtcaaaactaccgtatatgttgtaaatatgacggctattgtcaaaagcaactgctttagtcttagggccactccaccaatcatacttttcatgtgggcaagctttttctcagggtaaaagaaggccataatcaagtaaacgaaacttaggcccccaatccattgagtaaaagagcgataaaaatcaaagctttttggcaagtcttgaggatgcataatctgactaagacctgttgtggtaaaccctgatgcactttcaaagaagcttttaacaactagagaaaaagggtcaatgtccttgtaaaatgggttgacatacatatatggtatacttccaaaaaaactcaaaaggataaaacttgaaaccatgaggacagatgcctgccgcaaattcattggtgttttttcaccatacgcgtttaatacaaaacccgttacaaacatgaatgtgatgcacaaaaatatgccagcagcggattctagctctcccagagagattgcgagcatggctgggccaataaacaaaagacccgcaaactgcagtataaaaccaaggttgccccatatcggtttataatgttccctaattactgctctatatggtctaaatgttttctccaatactgaagtcctaattgcatgagcaaggccttcctgggtcacaagacccaagatatgtatgttatcagtgacagggattctttttattacatttaacctcataagctcaagggcttgtcttgcattagcccttgcagatattgttatgatgggtgaagacataatactctttaaaaaaacctggtcagaatcttcccctttcattacaatcttgtctaaaatatcgctgtcggtaataatgccgacatattcatcttttttattcttgacaatgattgtttcagcttttttatcatgcatcagcttgaccgcagaagctgcatctgtttcttcgtccaatataacgagctgatgatgcatatatgagattatggagcggtcgaggggttctgtgaccattattgtttcagattaaagattgacttaattcagtgatgtttaaactttacttgttgcagggtggtgtgatgcagacagacaatgattttgctaatgatgattccgtcggattaagtcccgtatggtataagggttcggtgagagccatgaggataaccacatgggtttgataaaaggatgttacgtcataacatgtatggtatcaacgattgtgtcgattttactatcggtaggtttgagcgtgttgggaggactgtaatgatccatcggttaaagatcagagaatcccaggataaaaggaaattcagagtattcatctaatgaccataggcaaaccttgtaagatgattgctgtaagccttcttataaaaaaaaataaatatttcctgcaatcttttattgtcctatgactcttaggataaaatgtaaacaatgtggttttgatcatatttcaaacatatatcgattggaggaacataactttcatagaaatttctcaaatcttgaaagttgtcctagctgtggatatgtatctaaatgtgatgaatcagattataaatcataattagtcagggtacgatagttggcttaataggttatacataaggatctatatagaaaaaaaggatctaaaaatataaatgaaatagtgtagatgaaattttatgaattttctaggttatctgtcttttttcctagctgtgattttcgcagtattttttatcatttgcatagctattcaacaaatggtaaattatcgtaatctcctagaaaaagcaagaaaattttctagcaataaattttctctgaagaattagattaacaaaactaaatcatcattaatgcgaatcaaaacattatttcctatctccgtgtgtatatggattcaattttgagaattaccgacgaaattcaatctactaacattgtttgtagttaatgattgaatagattagcatgaaatacattaggtaaatcggacggtcacttaatctaaattgacgattgatatctttaatcttgtaacaaatattatgtagggtttttcaaatctatcttttggtataatatgtcaacgacttctatcgcatttattatgttagtaactgcttcgaagaaaagattttgattaaatccgtcaaaataaagattcttacttatgtcgatagattctaaatcatcaatattgattagcgcttttttgtctaaacttactggattatggtgaccgagtcagaaatacgaatgcttgcttgtctaagcttgtcatattgacaataatacaactatttattatctattgaattttgattagtttataattttaaactagaaaaaaactgttaatctcattgtttagtaattacaaatagtatacttctatagtaaaatagtttgtttgtaaataatttctaatcagttattttttatcttttagtttattaacccatttttctcttctttgttcttttgaagatggatgattatgaaatttttttaaccagtgattaatcattctttcggtatttacggacaattctttatacaagtctgtcattttttctgagcgtttaatatattccttgtatatatcagtcatggctgtaatatacttaatatatgcattaaacaattcaccccaagccagtggtgaattatgttgccacccatccgtaatggatttaaactgattaggattgttcatgtttcgctcctcattgctgttgttagtggtgtcattatttccttttgcttactttttcataataatcacagataatcagtattcagaggtctaatattttacagttattggcttggtttgtaacttgactaggttggatgagatttcacaataaagttttgataagagtaggaacctgatataaatactaagagttgaatcatattttcaaaatatgactagtatcttaaaaatattttaccagtaataactaattaagaatctattttgttgaaatcttaataatatctatgatgtataattatcatgcccatagttagtgtacaaatgtatagcgggaaaggtcaaagagaaaaagacagattagcagaagcaatcacagaagatgtagttaaaatattaaatgtgagtaaagaagaagttatagtactatttacagaagcaactcatggaaattggtattctgctggtgtacgcctctaaggaacaatagggaatgcattaacatactgcccacgcactctttgatttattgcaatttctaaaaaaagtatctgtttttgtgatctattatcaaagcgataattgtctatgaaaaacatatgagatacataaaataagacagttagtataaggaatgaatgtatgattaaaggtaataaagaaaaattaccacccctaaataaaagtgaaatactgcgagtttgtattcaattgtattcttaccatgatgggagcattaaagaaaacgagttgtcggtaggtgcactatatcatgaaatctttggtaatgatggtaggttagaatttaatagttttaaaagcgatattgagtggctaaattcaaatggtttgatatcgttaaataataacgccataacactcgataaaaaggttgcaaaaacgttaatagattacgtttttgaacataaagctgaaatctgattatttagacggttgagatcttcttccgatggtactgatatcccaatataatgatttaatgccgattaatttcgtttcctaatagtttgacatttttaggattatcagtgcattaattgactaaagaggtaagactcattttttgctgtttaggctaagagtcgtctgcaaaaagtattaggaaactgaattattcttattcttattcattatctatgttattttgagcattctctagaattggtagaaaatgcctattagtgagatttattgacaattattgaaaaatatagcatccttatataacattatgtatattactatattaggagaatattataaatgaataataaaaatatattaccatatgattggtttagcaattttttcaatccacttgacaacagaggattctttgatagaagcgatatgttcagggactttgaggacaggtatagagggatagatactatgcttaatgtatttaatgacatctcaaccaatgcaccaggtgaactagtaagagagtataaaacagaagaaggtgtaaaagtacgagaggtaggacctatagtttatggatattcaatgaccattggaccagacggcaaacctcaaataagggagtttggaaatgtcaggtctcttggggagactggcagcaatgtcaaaaaaataggacaaaacattggtaaatcttcacagatatctgcagaaagagaacccctagtggatgttaatacaactgacacacaagtcaaagtagtggttgaaatgcctggtataagaaaagaggagataaaaataaatacatatgattctgaacttgtaatagcaacatcaaaggatgcccaacgaaagtatcataaaaatattgaacttccagagcaagcagaaatcgaaactgccaagtccgtttataacaatggtgtgttagaagtaacatttaatgtaaagaagaaagagatcaagcctaagggaaaagagataaagatcgaatagatcaactcaactttattctttgttttggtatggttatgaggtaacaacaaaataaggataagaacatcgacaatcttaaaaaatactgcttagtggctaccgagaatttatcacatttaataatatatgtctaattaatttatcacgttgtttctataaattcggtatttgggttcgatagtatctagacccgcctcctctttaaactcaacaaccattctgtgggattaagtcccttatggtatacgggttcgggcacatgaaacaaatttgacctaattttatcatttagatgaattaattagttcttgtacgagattgtaagatcattacagcattccaatattttcaaataatgtttgtagaactagcatcgcatggtctttgttagaggataatgcaaataagtatctggtttgatcatgtttcattaagtcaaataaagcaagtttacttatcacttttaatgctatatgtttccgggatataaccaccgtctaaagatacgactcaaaataggaagcgcaaaataggtaagcaaaactaccagtataatactaaaaattgcagtgtttgcgaagtggggccattctccgataaatggactcaagagatatcgtgatgcgatgctaataatataggccgcaaagaagataacaatagccattttccatcttggtggtggagattggctaagggttttcaagcctggaagtgtaaaccaagtttccaaaccggttgatgtctcgtaatgcctggtagagtatttgtttgcttcgtctattagttctaatgtttctttagaactatcccatttttccatattcgctttgttatcaaatttgcggattatatatcgataagacggtttcccctcaccaggaatgattattgtaatgctacgatatcccggcgcgcttttctgaagtgccagataccgctttagccaattgtcgtaatccttctcatgtccgggttttatatttctacatattacagaagtgacttcattctcaagtatgtctgacattttactcgcatcattttctattctattgtctgacatatgtcttgtggcacaaatttttgtaaccgcgtcatctttggatttgccttaaaacatgtttcggtgagattaagttctgtatagcctaaggatttggtggaaatcatgaggatattcacacgagtctaatagaattaaaatgaactattcaaatttaacggcactatatactaaaagttacaaaaatacggatccttgaataaacactttgttagaagttatgtacttctgggatcaataaataaatcataagaatattacatgagaactaaaaatatggttgaaggaagaattagtagcagtaattatcttaattaaatgagcaaattccatatcaaagatgatagattatccttttgattgaagacaagatttgaaatattactattcatataatcggcactgctcaatataacgatacctctctccatagttggattaaaggccataaaggcattgtaaccaccaagagtaatcccattatgccatataacttcttgaccaaagtttgtagttataatccatcctaaaccaacataagatccgattgtatcagcattatttgatgcttgtaaattattaggtaatgaaagaccagtactatgtcttattaaatgtgattcttgcatagcatcatttaattttgttttaatcaatcccatgttagctgataggaattttaacatgtcgctagtagacgaataaactcctccggcaggatcgataggagatgggacaccccataatggaagttcctgaccgttataatgccccactgctaagcgagatttttgtgaatctgaaagaacaaaccttgtgtcattcattccaagcacattcagaatattgtgttctagaagttcatcaaaagatgacatatttgatttcagggttaaaatgtgaccgagtaaacctatcccaaaacttgaatattggaattgtgaaccgggttctcttgaaagggtagtattagaaagaccttgatagaattggctgaatgaatagttattagtacagttcatcaaatttattcgatattcaattgaactagaattagtttgtgatttatcaggtattagacaataattatcaggaaattcgggtaatcctgaagtatgagtagctaaatcttcgatggtgattttatgaccattatattgagggactgtaacattggcaggaagatacctgtcaataggatcatctaacttgagaagaccctcattaaccatatcggccaaaagagttgtagtaaatactttggtattggaacctatggcaaagagtgtattttcgtctaccatagcgttacttgtattggagattttgccatgaccatagaattgagttccatttgggtcgataaaccctataaccattgcagcattagttttattcctatcaacacgttcatctatgagcgcttttatctgatcggttatttcaaattttgatgttaaattgtacttttctttatgtgttgaggagacagcggaagacgatgcagaatcattagatgaattagttgtaggagaaggcgatgctaaagctgaggccattgatgggtttgttagaattgtcattaataatatatttattgcaaatagagtcggtaatcttctggaaaagtggtttaaaaacatatatctatacaatcactcaaacctgtgtgtatttaaagatcgatccactatttctttgattgtctttttaaggacggatctgtcattatagtcgctatatgcaaaatagccgatccattcaatgtgatgattcttgtaatatcaagatgtatagtgacgctatttttattaatgaattgaacaattgtaaacacctttatttcttgttttatattatactagatatcataattggtatcgtgttcggggaaacgagtatgatatttcatactagttcaaaacattctataggatatttgcaaactaaagtgtggtttttcgatcattctatatcatatggtgatgaccacttttcccctaggatgaacacctctttggtaatctaatgccttggctgtttccgtcaatggaaatgtcttttctacgtttactttgatattattttggtctatccattgtgccaatttagtcaatcgttcactcgttgtttcagtaaattgaaatatcgctttaactccatatttattcatcaaattcgaatctggttgttctaacatggaaacgatagttccgttatttttcaatactttaaaggattttctataggtctcgccacccacagtatcaagtgcggcatcatagtcctgtagtatatcttcgaaactttgtgttgtatagtcaacaacctcatctgcgcccaactgttgaacaaactcattatcttcggattttactgttgtagcaacatacgctcccaaatgctttgcgagctgtattgctgttgaaccaatacctcccgctcctccgtgtattaggattttttgattttttgataatccaatgttatcgacaagcccctgccagctgctggcaccaacaagtggcaaactagaggcgtctatatgattcaaagtttttggtttgaccgctatactgttaatattggtcaaagccaattcagcaaaagatcctgaaccgccagataatagggaagcttgtccgtagacttcatcacctatgttgaaattagttgacacattctcttctaattctttgataacgcctgaaaaatccgttcccaatgtagctgggaattggagtggcaccatttgttgaaagtatccttcacgaattttccagtccacgggattaactcctgatgcctttacctcaacaagaaccttgccggtagacagtctgggtatagagacatcgttgtttatgtcgacaacgtcgctaccgccgtattggttgatttgaattgatttcattatattatattatgatttgattggatttatggttgatgcgagtaaatgttaaattttcccacaactttggtatttaatatccgttcgatatatacaaaaatccaaaagtgaacaatattgtgtaagaaacccagtgattattatgttaaaaacatcacggttgtaataattttttatagttcaagatctaaatattttgacgttggcggatacgtgtaggggattaatttccgtatactatgcgggttcgttggaaatcatgataatttccacatgagttcgataagagttttttattacaaatcttcatagtttcgtactttattcgttaccataatcgatatctggtttggtggtatatgaaacaaatttgactctaattctatttttttctaatttcaaaatagaatttataatcctaattctaaagttattggacaataatcttggatcatctttcaagcctgacgatcctaacgtttactaaattatctagtttaaatcaatcgaaattccatattaaaactaattcaacaaattttgttccactcgagtctcttttgaaggactttgataaattctttccgaccatacgatcctttcgactccttcaagtttttttattgcagctataatgtttaacagctgcttaccttccttatatactgcattggctaaaatatcagaatttcctatatgaatttcaaacgacgtgattccatcaacctcgtagaccttttttgcaatttcatcaatatcgccatcttttaaataaatatgcaataatccggttttaaatccaagcttttcataatttaaatggactgtgggagttattatcccacttactaacagagcccttacccttctctggatagttgatagaggcatagaaagttgcgaagaaatctgtttattatttcgtccatcaaccattaattcgataatctttatatcaatactatcatttttcttatcaatttgtttcatagatatgacttgacgcctcatcaaatgtgtatacattataccttttaaccactgatatacattttagtctcaaaaaataaaggatttgtcaattattctatattagtatatgactcaaatccaaattgtttaatctaaccgttagcgattttccttcaagatgttaagtagtacaggtaaagtattgtccctggatttttcaatttcttctgaaaaatgtacatctgttatagatggttttgacttgatctcatccattaaacaaaacaactctttagaatcctggaacatggtctttatacaaataccgtctgatccatccgtagttgtcaggacctgcaagatatttttactaaccgaagtcttaaaaatttcgttcacaaaattttttatattcttcttttgaatgtgagcgaatacatcagcatacctatagtctagtcccaattttctaaggtctatgatgaactttttctttagaatagtagtttcgattaatcttcttttcctatgaatcagagcgagcggaatttcaagtttagaggaaatttcaaatgtttggatatatggatcgactagtagttgcttaataatttgtaaatccagcttatcagcccatatgaaagatctgtaatgatgatcagagttaccagatagattattcgaatagtttttcatatttgaagtattattcataattttggtagatttttctgttttagtatcattgtaatgttttttatgtgattgtgaagcaagtccaatattatctttagtattatcttttacttcatgtaaacgccgttttttaatcacaatatggtatagattgagtgagcatggcatttaaacttgtaaattattgaaaaatgacaccatatttcgtgaatatttaccaatcactaacaattagtcattatgtgcgcataaagcttccatttcaaagttagtatcacaatttgttatggttgcacaaagcaaaaagttatcgttaaagaagactacatttgagacaaacctattctaataacataaaaaatctagaaaacggttaaatgaaaagaggttttgttttttttaatacatattgtagtttttagatggtattttgtagttgaattacctgccatgatgctatatggacttggtctaccagaagagagaaggaataggatgatgattatacaacattatgaaataaatagaatcttaagggttgaccaataaatggtatgttattgaagcataatcatattcgggtgaaataggattgaatatacttgttgtggtacggatagtgtgatctccaggcgataacggttcgaagaattatagattaaactacattttccaatttctaatataagctatttgagacttgatagaattatcgccttagaaaatgtttatatatatttattcatagatcagagtctaatatggatatgaaccaaagtactggtgcatttactcatataacacaaacaaatgtgatgaagacatcaaatgttggcaataaagaaccaatttcctgtcatagagtggattgtttcttaacggttatttgcaaatgtactgaatgtatgttttattattgttacgaacatatacaatcacatcttcatcctagagaaaaacttaagattttaaaatagttttttagattttcctgacagatttatttagaacaatcataccgaattaatgagaaaccttgttaaattgataatttaaaattcaatatggcacccttattcaaatgtcattcttgcaatgcaattacagaaatttctgaaaaggacagaaggtttgacaataacatctgtagttcatgcggagacagactcaaaaagaaagaataaagaatgatagaaattcatgaattatttaataatacgaaacagagaggttagagtcgttactaaaattggtagcgggttcggtggggacgagtgtgaaatttcacactagttgggaattattattaatcaggagaatgaaatttgttttcaaagatttgtgggtttcatatgtataataattacaagagggttaatacaattacgcggctatcttaaagaataaaggctaattctcatagctgaacttgcgatgtttgaaacagaatatgtataggaatgtttaaaaatgcctttattgaataagactgtattttcttgcgaaattatagttctatccgataaaagcattaacttttgtataacatattatttaatctatgatcattttgaatcgtaagcagctactaaacttgataggcgttgggtgggattaagtcccgtatgatataagggttcggtagaatccgctatattagtactcagagattgcaacccgattttagtaagaaaaaccttagcttaaaagttttctacattatacattgcagaaatgatactactatgcaataggtttaacaagaattatctttaaaatattcaaatatatatctaaagctagaatagaaaagatgaatctaattaacagaattagaaatacattattctttattttttagatcaaaaagataaacaaaaacaaaatcaatactcattttgtgattcaattttgatattttattaaaaaaattaatgatatgtttaagtttcaggacaaactttatctttgctattatgaaaaatgaatattgatatttctatgacatatttcaaaggaattaagaagtattatttatgctcaaaataaaatgaatcattaatttctttttagtaatgatttgaataaataaagaggaaaagatttgttttattgactctgcatgcatctatttcctagtgaggctttgatataccattgttacaaagtcttctggtttaaacgtgctatggttataatagatttcattgtattttgatgttggctgtgaggcaattatttcttccaaggattctccgttttgtatcaattggcttacagtctggtgcacatcttttagcatggttataaaagcattgacctttgttttattggatatttctgaatgacccgataccactttggtttcgtcatcaattaatgatgatattgtctgtaaagaggatatcaacccatcgatgctgccaccgcttgatatatcgatcaatggataggttttgtcattaaagtcatctccgacatggattacattattctttgtaaagtaaacaatagagtcgccatcggtgtgaccattgtctacatgaattatccttatctcatcaccgttctgaaatatggtcatgttatctgagaaagttataattggtaaacccttttcgggcaagggtgcaaccgttctattgaagaatgctaagaattgctctgtgctaaggcgctctctaacattatcatgtgatattattaccgtacctaattcaccgaaattttcatttccacctgtatggtcagaatgccaatgggtattgattacaaattttacaggttgatcagttatgtttgaaattgcctctttgattttttcagtaagaggtgcaaattgatcatccaccataaaaacaccatcttgtccaacagagacaatgatgtttcctcctgaacctttaagcatgtatatattatttgatagttttgttgtattgatggttacattctcgccctgagcatttacatcgttaatagtgactgtcaaagtgaataataatagcaatccaattgcaaaacacgacaaaaacacctttctcttgtagttacaaaactttgatgtatttagtttacaattcattataatatattttctttattatattaaaggctactcaataagtcactaaccaccaaaagtcatctagcatcataattctaaatatatacaatgcacagtagactagaagtattatgaaaattataaaatcataactcatgcgggttcggtggttaatgtaatgatatcgttctgtaatgggccctagccattataagaaataacggctctgttcatttagcaggttttgtctttctgttatgataaattacaaataaattcaaccaatttttcacgtgctttaacttgcaattctttgacctacaaggaaaataatcatcgaaacattcagttctgtccttaatatattgcatagtcctttcaatcaaacttttctctattgaggaatggatatggtgttttaggtttagaaaccgacaagccattgggtaccatgttccaccatccgtagaaaccggatgttttccatgaatcttgactatgcctgacagaaaacgctcagcaacaaacatgtttctttccttggatatagatagtgcgagaatttgtctgttttgaggctctattgctacccaaagccaaatgtattcagagccaaccttgatcaatgtctcatcaactatgaattctgagattctttttgttttagttgaaatcttactaggatgatacttttgaatccagttccagatcgtcacatgatttcttttgtatatctgagataatctttctgaggctttccttaaggacagacctgaaaaatacaaatgcaacccataatatacatactttgaaggcgttctgtttctagtaagcatgaaggaaatggaatgctttcaagctatagacttgtcgctaactgaacagagccgaaataacgcattaatatagttatatactcctaaaactagtcaatatgcccttaatactccgattggttctgatagtggcacgataggaaattcgaatccattagtcttttgccgacagtaaattccaacacggttcatatacttatatgctgttttaccaattgtttttaatcattccaattacgattgttatagtttctacgcttggtttgggtgtcgttacaacacatgcacttgatcatccccttccaagtggtatatataaattccattcgattccatacataagaaacactcttggagatactgtttatccatcaggaacgatgataattgcaaaccacttgggtaaaagtgtagaagtcgaattgttgcatataatcgtactattttatccacacaaatagaatacagagatacgctttatactagagaggaccctgcgatttatagtattgtaattacttctgagggtgaggtgccgatcaaggaactgctggatttgaggagttgtgtagtaatgatcgttctccaaacccctaccagagataacgcagaagtttatgtagctcaatgccctagggatttatctacttcatcagatggattggagtttgggaatactgcatctttttcaaactcatttgaatctatcaaataactatttctagcaaattgctacaaaaacctaaacgattcaaatatttcttccagttgattctgaacattcacagaatctatgcttttggtattttgttgatcctgttcaaataaggttataaaaccacgatcttttttgtcatttatgataaacgttctttcatgtataactatatttttatcatcgtacgatctctttacgattacagttccagagcggccacttctaataggatatttatccaacattgattcttcgagtattgtctctcctgagtaaattgcatcctttaatactttttcaatagccatttcaatgggaccctcggagtttatttttacattcactcttttaaacccaaaaattaccgaatcgctgtgcatcaacacatctgcaccaaaattctttatgctctcatcagttatctcgacccaatctgatggataatcaaacgctatgcataattctatattttcatagtgtttcttctctaacttcatcctctttgatgctcctcttcttcaaataaattataatagatggcgggtttaaaaatgatcatactgtatcccacagtattttccttaaacccattccatcaatttctcagcagactcaaatgattttcatacagttacatagtcgtctaagtctgctggagttcttatctcctgtgcatctttaatatagtcggcgaatgattgattctaaacctcttcagcgggtctcctaataactaggtattcgttgtagggaatttcggaataaccgtttttcattgactgcgaccatcttctccttcgttggtttttgatttattgtcctcataccgtagtagtaggcctaaaggctttttacaaaacagatttcctaggatttgataatcttctagatgcattgctaaaattataaaaataatactttatgataccaactttattagtcggaattaagacccaactgcagtaaatcctacctttacagcactaagtattaacacatagcaagactgtctttcaatttgtagttacaaatgagcagggattgacaggtaaatctgacattgtttcaattactgtaaatggggaaaatgaaaatccatcatttgagggaatactcggctctggaaaaaacataaacgtccaggttcaagagaattctggtaacattgaaggtggacaatcaggtgctggaaatatgtattctgactcttccattttccaaggtcaatctacagagcaggaagtcaggtaatatcttagacttctaacaaggtaagacaataagaaccacagaagggctggataaagtctcatctcattttatttatcaaaatccaagcaaattgttactatatataggtagatggttcggtggaaatcgtgtgaatttccacatgggtttgagatgatcagcataatgtttggctgtttgtcaatggctaaatttatgaaggatttgatggggatgaactattttaaattaacacgtataagcaacctttaattcatagcacgcatactagtcgacactatgtcattaaagatatcaattgttctttccgtttttgccttatttttcttatgttgtggtgtaactctaaccctaacatcttatgcccaatcagacttgcagacaactaaacatagaaacatggtcatagatttgggcaatggtttggagaccaacgcaagactaaaccttccagccgttggcgacggcccctatccaggagttcttttagtacccgggctctggaaaaactgacatgaatgaaactgcagggtatgttcatatagataatgatacaggatcaattatatatccgtctagtaggccatactttgaaatagcgcaatatctttcagaaaggggctttgcagtattgcaatatgacaagagaggcataggcgaaaattttacggtactggatagcaatgtatgggggaatgccacagttcaagatctaaagcgagatgcggagaaggccttagatctacttatacaacaaccagaggtagatgctagcgatataactctagttggacatagtgagggtacaactattgtcccaagagttgcaatcgataatccaggaaaagtaaataaccttgtattaatgggatcggtagcacagaacataagtgatttaggctactatcagggagttacgctcccgttgctttatgcccaagaaaatctagaccataatcacaatggtctgatatcagtacaggaggcggataggaaccgtctttttaatactatttttgggaaccttactctatttcttgctcaaaatattactgctacaaatggaacgatgatcgaacaactaaatcctcaatataatacgaataatgatactttcataagtattaatgaagaactcaaacctaggatattatctttaatcaaatcattaccatctcaagttgcaactccaggtgaaaagtgtgatcctaataactcctgtcctatctggattattacacattatcctacacctactttagatatcataagtaaagttccatctgatacatctattctaatacagcaaggaaagaatgactcacaaactccaatacagcaagcacttcttttagaacaggaactgacagaagcaaaacatccggatcatactttgataacatatcctgaccttggccatgctttctcaccttcatctcaatgggtgactgcttttggcccaatggaaccaaaggttctagaagatctttttggctggctttcaaatccagtcagggactttaaggaatttaccattttgaaacaagaatgatatgccgtgtaattgatttggtttgtctaacagattgttactaatattggtagtgggttcggtggtatgtgaaacaaatttgacctcttattgatacccaaatgatatattatagaatgcaatttcaaattgcctggttcaccctagtttcatttgtttagaatttgccttcaattttgaccacgaagaataataattagacaacttgcactctatgaaaagtaataaagccgttatcgcctatcatttgttttaacggtaacaacaatggttgtatcttttcttcctcatctattgtttctatcatcataggctgatttatcattaaaccctccaaatgaactgttgacttgcctcttcttccaaatccgtcaacacctagccatactatagcccctaaaacgttcgccttcattaaaaattcaataatagttttctccagtctttttccatttacattgtcgtttttctttatgcgaatgtttaagcatatcatttgtttcagggtcattattctaaaattactattgtaataattgaattattaagattctgccaccatataacgccaaaaaggataagcctacattggctactgtattaatcatcatatttagaatttgtttattttctatcatcactatgttttctaaagcaaatgaagacatcgtggttaaagaaccacagaatccaatagcgatcaaaaaagaatatctttgatctatgttccagttaaccaatagaacagagaaaatgcccaggataaaactacctacgatatttacaatcaatacgtttgaacctattattcctaatatcaaaggaaaagaggtgatcttatatcggagataagcacctaatattgctccggctgccaataaaacaaactctattcccttcacgactgttaatagatttcatattatactttatcttttcttatatctggatttcaaaaatttaacaatgattctgagaaataatagtcattatcaaccagtcttctaaaaaaaatagacaaattctcaaactttatagaataggtgcaatccaaagtagggttgagtctattatctgaatttactccaattgaaatatccgcttttctaaaggcaggattatcattttcagaatcacccaagtatattattttgcctttgatatccattatttcatagagtttggaaacaacagaatcaaatgcaccacccttatttaatttggtaacataaacatcaatgaaaggatgagtagaatattcttggatataaagatgttgagtataaaaacttgacttttttttgggtatactgccttctttttgttgagcactatttaatatattatatactgattcttggcgctgttaacttaggcgtctggcacctccttgttgtgtatttttacaaatagattcaaccagttgttgacatgatctagtttacacttctctttactacatggaaagtaatcgtcaaatccttcagttcgattcttgatatactgcatcgtcctttcgataatgcttttctcaaacgaagaattgatatggtgttttagttttaggaatctacaagccattgggtaccaggttccaccgtctgttgatacgacatgttttccgtgaatcttgatcagacctgaaataaatctctctgcgataagcatgttcctctccttggatttattagctaagaaagagtgcgagaatttgcctattttctggttcgattgctgcccataaccaggagtattctgagccgacttttattaatgtctcatcaatgaggtattctgatatttttgttcttcttgttgaaacctttcgaggtttatacctttgaatccaattccaaattgcaacgtgacttctattgataatatgtaaaaaggacaatgccttggcagtatttctaagcgataagccaagaaagtacaaataaagaccatagtaaatatgctctgaagatgttttatttcttttacttaacataacagaaatagagcgtctttaagctaaagatttatcgttaagttaacagggcccttttgtgactgacactatttaaatacaaccgctgcaatttgaagaaaacagatataataactggattaactttaacaacaatagttaacaaaatttatgttggtggtcgtttcagatgaaatgtcggcttacaataaagtatattttaactttcgggaaactctgcaatggttgtatatctatcgttaaagaacaattaagtgatataagaggaggaagaaaagtggaaataaactacattacaaacattatgatagggaatttgatgcctcattaatgatattattaaagttaagaaatagatgactataaaaaaaatcaatatgtaaattcctgcatcatcacttcgttcaaatagaaccgaataaataatttggtttgtgtagaatgatccgaaattatgagaatagcggtttgttgaagaagaaataactgatatgattgcaagtgacactctatttgtcattcaatgttcccaaagtaatctacattattataataaacacaatggtccttacaaataccctctttattaagcggaatctgttcatttaccttgaaattctaaatcataattatttgattcaaccctgataataagatcagtataatctgatattgaactctcgcgctgtgaataaattctgtataagagatcccaaccgtttgcctcaattaaatatacttttctgactctattataggatatcaatgaattatttaccaaatgatacaaatattctctcaaaattgctttcgatataggaataactctagggatatgtaattcgatttctgaaaatgacgacccctttatacacgctaacaagattgattccgtggtggctacctttagacaaatcgggtttatgtcttctttgctgcgttcccgattcatttaatccttgtcaccttttattttgtgatttagaaaggtcgcaaaatcgtccttgttaaatggtttcaattcttttaaattcatatgggatggtaattaaaaaacatttaggagctataggcatagcaagattgattagtcatcatgattgcgattatatttggaataatcattatggtgtagataaatgccatcttaaaatactagaactagattattaacaattcaaaacatgacttttttaacaataggattacgataatcgatcccctaaactttaaacatcaccggataaattgggcctgatttaggatacctatcttaatctattttgtattgggttgagtaatgtgaaattatgacgaagaaccaaatttttctgttaatgcgattaaggtttacccaatacttatcagaaaaattaatgggattctagaaaatcttgatcagtatcgaatcaggcgatatcaaaaaaaatttgtctgttaattttatattgataatgtatattaaattttaataaaatatctataaacaagataacaataaaaaaaaggattagttatttatttgtcctaaagcattgttgcctttattgaattggtcttggaagttaaagttgttaccagataagaatgaacttccaccagaaactacttgactattctgttttgatttttgagattgttcgattatttgttttgctttgttacttttttttgctaatgcgtcttctgaaattgccaatggggctaagatcaaagctagtgtaagaacaactgatgttgatactagtaatgttttacttgtgttcatacctgtaaattctattatcataatgcaatatatattaggtattttagaattttatatgaacatgtttcagttggtttgaacagaaaaatcttctagtatccttactcatatgaatgacttccttaccattgttagtacctaatcctgataattgaatgaaagttgcaatatttactactatttatattgtcttaggaaaaataaaattactaatagcttcaagttagctttcacaatattttgctaaaaaatgattagttatataaacaatattgaacatctacaattaatgacagacaatatcattgatgatgcagccaagaaaataaaaaattcagaacaagacgctgaagcaaaggcagaaacagcccaagatcatgcagaaggaaagcctagttcagagaccttgaacaaggctaaagtaaagataaaagatgcattagattaaaaaattatttagacactttaacaatatttttttttactatatatctaaatatcatctcatcaatagtttacatatcacatattctgaaccttgattttccatagaatctctgatagtattgattgctctattatcctttgttaccattgataatgcggattcataattaaggtgtttggtatcgtatccgaataaacctctttttcattcattgttttggttcctcttgtgttcagcgtgaataaagaaagggtttgcgaaattaccatttgaaaagtcgttttggaagtcgataacatattcttttatttgattttatgtgtcggaagcgtgctatttataagtattagtgtggtttcgctttatttcctgcaagtacaaatttatgattattttactcttgataaagcatagtgcgaaattacctcattgaaacattgtttctatttgtatatatcgatggattgatccgcgagtattatgttacctttgctattaaccattgaatctacggtaaaaagaggtaaaccagcaaattccaaaagtgaaaaactgctgtgcttgctaaaatatcaaaactacatatttcaattcatacattaatttatgacatagagacattaaattgagatcaaaaaaattttggtgtattcgtagagtatttcagtttgacctcgtaccatggatttttaaatgacaattttcttttatctgtatagttgaggaaattaatgttcagaatatttctgctttctctgcgccttgactatagttactttgctcgttcgagttccacatatatttttgaagatgtggtataaggaatagcttgcttaactttacactcaatgttatcaattatagattcgatagcatctgtactcaaatcatcacttaagcttacttctattgctataaggacatcttctggtgcaaagtgcattgtacgaattgaaattattttatctacttcaggtattttagaaactgcattaaagatagcctggtaatctcttctcgacatggcttctcctataagcaaatctttgttttctctagccaaaaagaatgcaaatgtcattaacgttataccaatcaagagagaaccaatggcatcatacgccatatttccagttatatctgaaagatagacggctgtccctgcaataattatacctaaaatagctgccgaatcttcaactataacagtcaagacagacgtatccttgctttctttaaattccatcattgtagtcgaaatagttaatctttcgcctctatcttcaattcccttcttgaatattccaaatgctattcggagagcatttgcctcaaaaacaaatgatatcgccaaaattatataagttatggatacattttctagcgcatgcgtctcaactccaaataacgaactaaatccttgttctaacgatagtactccagaaataccaaagatgagtgtggctacaataaaagaccaaaaaaactgttcttttccatgtccgaatggatgtttttcagaaacttgttttttacttgttttaatcccaactaaaagtaatacttgattaaatgtatcggaaaatgaatgatatgtctcagcccacatcgaggagctacccgttagaatcgcggccacaagtttggatattgcaattcctaagtttccaaataaggctgcataaattgctctttttgaacctccccctgccattgatgattgtattataaccctccatttaagattagatataactgcaaaatatttatttgacgttaactggattttccaaccgctttttatttttcattttattcgaaataatggaggtgagaacctcacaaggtttatcaaaaagaccatccatacaacatggagaaaaacccgaattatccacaggtctgcaaatattgccatctgaccacacacttaccttccgatatccctttattgatggtagataacttgataattatttctttatttctgccactgtgttttttttaagatttcaatcccaaccctaatagtgaatgtcaaattaagcagattggatttaatttattctggtggatccaatccgcacgggtaaaatccaaccctactgccacccatcctgagccaatttatatcataattttaaaaaaattcgaccaataatgagaaggatcattcaatctatagcggcgtcactatataatcaggattccactaacaaagacaattaaaacgctaaagaattataatgataatcgtagcggcaatgataatatcgataataaaaaagtaccgcataaaccgcatattcctgttatttcatttcagggctataaacataatccatcttcgaattaaattgggtcaaggattcaatcccaaatgaagttcagagttagttaacctacttctaaatcaaaaaggatttttgttaatacatgaacttcttgccaatcttctgtagatatactgctgatttcaaccaaatcctcgttgtgtacgactctacatctgattttcattgttttataagtaataagattggaattcatttcttctagaatctaatacctagatacaaaatgccaactaattttcttaatcttgtctcagtcaaaacgagatcatagcataattgagtaagacaccttattggctcgaggaaaattgccaaacaagtggtgttataaaacttgttaaataatatgataaatgataatctatcatgatgtttgtgtttttaaacctggaaaatgacagttgaaaagcgtgagcataagattggtacccactcatatggaaagggaaaatatgcatcgtcgaccgaaaatcgtcggttagtatgggaatacgtaatctggccgctaatattggatgttaacagaaactattttactttacaagaatatcatataaagcgagattgcgtttgtgaaaacaaagaaattttgccttccaaggttgcaggaggatttgtgtcacttttggttaaaggcattttggtgcgcgaaaagaacatttattcaatccattataaattaatcccgtatatgagaaaaagagtccacctagattatgaaacggttctaaaggaaataagatcaaaaaaataagtaaatcgtctaaataggaagtgacgaatataatcactccaattatatgcttttttataatatttccaccttaaaatgcttggctagttggtgtaatgcttagtcatagtaaattaacgacgaaggtatacgttgagtgctgattgttaattgaagatcatgacggcaatattctcacagaccttactataatagtcagaaaacactggaattacaaatgcatttggacagagttagaagatacgtcaacacaacagattgcaaccatagcaatttacaagagaaccgcccgaagaagaaatattattgatttattgtttctggtggctcaacaaccacattgccttgcacattaactaaatatataggatcaccatggagatcaaatttcgacgttttagataccttagctaccattggctgtacttttatttttgctccatcatcgacaacatattcattccaatcttgagttattatcgtataacgaacatcatgtgttattgattgttgcaattcggatggagaataggctttggaatctggttgatctctctcatttgataaaaccacaattatattttgaacatcaatattgtaagtagaattttttttccgaattttagtggctattactttaatctttagaatcgtgctatctgataaatcatatcggcaccagtcttcccttgaaaccgtaaagtctaatggaggccttaagaaactatccattcaattttatggttctttggttattattaaattcagtgttagatcagataatttgtgtgctgttggatatttccatcaaacccaagtcgttcagcttctcttttcgctttgttaaataaaagacgggatccacctttcagagtatatttgtcacggtctgtaattgtactttcttggtttatcacttagaaatgctgtctaagcattgtccttgttacatattgttcaggaaagatgtattgtgatatggaattggatataaaagtacagacctcaaaaggtttctgcaaatagaacaaagatttcagaatccatgttatacgagacgttcttaaaaatctactcctggttaatctggttatgatttgcaatcaaattgaggctcacaggaggaaggttctcgtaattttgaaaaaaataaccaaagaggggaacatgctcatccagtgaggtttctatcaggtttgggtaacattcgtagaatacattaggattcaacatatactgtaacatggtaacctcaataatgaaggttcttaaatcttgatcaccatatccattcctctttggaaagaagtctaagcgagagaacgatgcaatacatcaaggacagaatttggatttgataagtattttcctatcagaaaaaagaattgtaagcggaagcatatcaaataatacctcaattcatttgcaagtaagcataacagcaaaataacgacaactttacaggctcagaatttccttaagccttttatatatgcaatttaaagtagacatgtcatgtctccaaacccatcattttatgtgatgattgtatttttgatagccatcataacaagtccaacaataaattcagtattagcctcttcatcgaccaacaagagtacttcttctagttatcctaaatccaatatttctctctattctatctacaccaccaagagataataataatttgacttcaacatttgcaataactgaccagataaaagccctcatagatgatcgtttagatgaaaataaaactaattctggaatcgttatcgggctcatggaccccaatggaactcagttttatgctcactgtaaaatgtccaattcaagtagcgctaccgtagacgaaaataccgtattttccattggttctagttgtctttctttgctagtcagatttatttcccaatctagaacccaaactatcgattctccaatgaaatctggacaaaagaaacttctgaactaaggggactcattacaggagagaaatcttgaaaatttgactcctctatgttgttaaaccaaaccgataagttatttgacattcagatcggcaggatggttagtctgtgtgagtctattgtgaatgtaggaaaaatggatatgtagtttgaaaagttagttaattagatcaaaagaaaatcattactgtctagcgtatagaaggtagcctagaagatttttcagtaatttttaggtagggaaatggcgtagtcaccatcaatttcttgcttaattattaatccttgttgttcaagtaagtcaatcatttgaactagaggtattacacctagtctgtgacgataccgttttttaagactacttatagttacaatatctggtttgagcgtcaaatcagatagcaagtttagaaatgattgcgaatacttctccaaatcatttcttgataaaatcccaaaggtttctggggataccaaatagtgctctgaaactctatatatcccttcatagatgatgtttaattcgtctttttcatcccaaccaaccaatttctcatgaacaagaataggtaggatattatccttaaacgctatctctgttataggaaaattagtatcttcgccttcaattgccatccaaactctctcaaatttgactttttttcggacatcgccattgaccgtttcagctaatctttttagaaaattaaaaacatggaattgttcggcataatctagttctgaaaccttcattattgagtttttgaattttattgcatttaaagataagttaacatgttacttgatcttctcaaaatgaattattatttcaaatatatgctatatttagaatttatttggatatcctcatgatttctacataacagatgtttattttggtaactgtactagtatatttcaagggataaggtaattctgggattctaaaatattgaaatgaagagaagaatcagtattcttgatatgaaattgaatcattttctttcatatatgtttcccttttttgtgtcctcaaaacacaacattgcaagactgagttgttgaacgccacaagaatatggattcctcagagagagaactgctactgatgactgtcctaaaacactgctaactagattatagctttgaagcgattatgatttggtcaagaaaactatgacgtaggtatgagggaggtggtattttttatacactcatatatatggtatctatgtctttaagaaatcaatcctcgttttttactgatagttcatatgattactggttaatagaaaaatcaggtacctatagacaatctttccacatgggtttttcattcaaagtcaaataaatcatctacttgtccattaccaacaaattcgttcttataataataatagtctgtgttaccatttttgttcaaatcttgattattggaattcaatggtatgtttgattcaagcacctttgattctttagtagcattcttttttaaattctttattacagaggcatcaagccatatgcctttgcatcttggacactcctctgcatataaaaaagacctgaatgttgatttgattttagaaatacacattggacaaatcagggtattatcaccttggactacttgtatactgaaatgagttcactcttttttttgccatgcttaatacattctgactaattagtcaattattttattatgaaaaatgttaagaccatttgggcctttgcgacaaccacaattaggcatataccaatcataggtatgataactgccatcaatgacaaattagctacactcaatcctccaactattgctgataaaatattaataataattactccgattaagagcaggagtcccgatttcctttcgtcattgtccgttaaagtctttgcagtctgttgatgggttaaactaattatgaggttagttcaagtgcctgtaatatatgtggtcgaaatgtggggtacccctaacgcacgaactgctgaactctgtatgcccatagatattgtcgctaacatgatgaaaaggtataaggcaaacccaccaatacttttacccacaataaaccctccaagtgtgaatagggctaggaatatcacctctaccaataaagccctagtaactgttgccggccaaatttacctttgaagtcctagattaggttccacaagtctgttacccaggactattccacctatgaaaccagttattgcaacaagaggcactatgacattaagaatatttccagtactaatcgcaagtccaagaagaacagtattacctgttaaaacagatgcaaaaacatcgagtcctataaagcttatagcatccatgaaccccgacatagatgcaagagcaactaacagtatgtttcgcaaatacaaaatctgagatgtggcatcattgacatctgctggcaatttggctgaatcctttgcaggtgtcttatctgaagggttattcatgatcgtcttctatcattttatgtactaagaaataaaagaattaataacgctagactgttccatttcataaaatagataccaaaggataattttggcttatcctttatatcagttaatatccaaaacataaagctctcaccaaacccgcgggactgtccttaggatttctaccgagtatactatatactgtctatctttcatttgtaggataaattcttacaaataattattttagttcattctaattatttaaacaagaatgatcacaagttagatagtgggttatgctggtatcaaggatttacaaaagtaatgagaagattcactttactcatgaactaggttcatgttttgaccagttagacgtattgatataggtcatgcattctttcaatcgtatttatttgactactctagtcagtcagtctgaccttccaatgtgaataatctgattagaaatcaaaacggattagaaatttttggagcggatcaacactggaataaaatatgtatccgtctgacttcatgttattattagataaatttatgttatttttataaatcttataacaaataattattttattcgtattgtcataatttagtgatatgtttatttacttttttgaataaatatgaataacctagagaatagtaataaggctacattcatgtcataaagaatgttatagtaaggactatggcaacgaaaggtacgtcgcaaactactttctatcgttgacgcaatagattccttactaaaacttctggaaaacatgaggttagatcaaacaggatgatgacgtggtcaaaagtttactgatatctttttactattttctaggaatgtatgtagaatcaccatatatcggatttttgtactttatatttgtaatatcaaatgtaaagtaaatatagaaaatgaataacgatacaagtgaaaaagaccagcactatccactagctcctgatttgacaatacataggataatcaatggcatgtggcaagtcgcaggaggtcatggatatatcgatcatgaaatggcaatcgaggagatgatgaaatatcacgaagctggattcacaagttgggatcttgccgatatttatggcccagcggaggattttattggacagttccgaactagattatctagtataaaaggagaagaagaactcgatagaatccaagcattaacaaaatgggtaccgcatccaggaagaatcgaatattctatcgtcaaagaaaatattcaaaaatcactttccagaatgggtgtagactctcttgacttacttcagttccactggtgggattataataatccgtattacatggatgctctcagatatttgtcagacctcagagatgaaggcataatcaaaaatgtaggacttacaaattttgataccgaccgtatacaactcatgatagattctggtttgcagattgtatcaaaccaaattcaatattctatcatagatcgaagaccagaggtaaaaatggtacctttttgcatggagcataatatcaaacttcttgcctatggaagcctgtgtggagggctattgtcagaacgatatctaggacaaatgcaagaaccgtctactacagatctagatacattaagcctgagaaaatataagaagatgatagatatttgggggggatggtgtttatttcaggaacttttattcacattgaacgaggtagcacaaaagcacaatgtgagtattgctaatgtagcaactcgatatatcctgcagaaacctgcagtcgcaggcgccataattggtgttagacttggaatatccgatcatagaaatagtaatgcccaggcattcaacttcagtttaggcaagtcagactatgatacaatagatgttgtatgcacaaagtcaaataacttatttgacatggtgggagactgtggtgatgagtatcgataatcatcttaaggtgatctattcttcttaaacgtcttggaaccttgtacctctttgaaattaggatactggtaacactcattcaatgttaatatcagaatactaataatgatgcaggtgtggggaagaggttttttattgattttccacccttcttatctaaaatagttattagcatgaatctcgaaaacttacactaactaaacccgattgcaatattatgagtcaacatacagtagatagtaatttccggaaataacgaattagatgaaattaagacaacaaaaaagtactagtcctaatagttgtatacatcatatctaatacatgttgtggaattgagggtcacgatctgaaattcgtaccgcacttaactagaatcatatcttttggatttattattatctattatttgtgtaaccaatctaaatatcatccagatttcctcagactatacatgctatgaggtactcaatattttaaccatatgcatatagtaacggcctagatgtatgatatcaactaaagtactcttaaatcatgaatcgatctataaaatcatgtctgcgttcatattaataaaaaaaattgaagcatattttttatcatcctttttcccaaacgactatcctcaaaacaaatcatatctattttgaatttgttggttgtcaataagatactgattcatcagattaaatgttatcatcacctgatgtttatcttaaatgattgctgtcgtatcatataattttgacatttcaatatgacaggggttgttgatatttggccgatgagttaatagtattgaatcgaagattatatatcagtaaacgatcatatatttattttaaggcgaatagaatacgacaagagtaaaattttataataaccaacaattatccgatattgaaaaagatattaatgaatttttgaagaaagaagaggttaaacagttaattgatattaaatttaccgcccttagcaaaaacggtattgatgaatataccgcagtaattgtttatcaagagaatatgaaccctggtaaagaggatcctcaaatgtacgaatagtattgttttatcttatacactatcaatttaattggcatttattaccacatgattttcccaatgttaaaacaaaattggtttcaaagtatcgattaattactaaacaaaacctctgtaagattattttttttcaaataatcttcagggcttggaaacaagatatcagacaattctactttcttatggagtttcaaaaacaatcggacaaattcatagttaatgcataatattcacagaaatgtttactcctcgtacatgtgataaaccttagcgatgatgtaccaggtcccatcaagttttatgagggtgtgaaagtccgtataatttgccccaagcgcgtcattctccatatcgacgtgcagtactgccgttgtaggcgtaatagctaatacatctattcgtgtcttgatgttgggcgcagggccattcttctcaacaaaatcgtagaggttcttgattggcccatggagtaacttgccatcgagatatccgtacattatagcatccttatgaaaggcctgggaaaggacagtgacgttgcccatgcgtaatccttctacatataaagctacagtaacaacagcatcttcatagtcctgagtaggcacattttttatattctttgacatgggatttctttttcattggaaatgaagtatttcatgtaaataaacctaccatataagataaaaattaagagattgagaaaatcttaggttaattgatcaggtcacgcttggtagctcgatgagaattaccaaatggaggaagtctaagaatttgttaaatattattaaataggaagatctactatattattcatattcctaaatcaaaaaaatgacgatagcaaaacgtcgggcaaagacaatgtccaatccaataggaaagggaaatatgcaacttccaccgaaaatcggaggttagtgtgggaatacatcgtatggccactaattctaaagattaacagaaattatttcacttcaagtgaataccatataatcagagacaaagtttcgatagaaaaaaatattcctacttcaaaggtgtccgggggactggtatcactattgctcaaaggaattctcactcaagacaagaaatattattcaattcattacaaattaattccctatatgagaataagatcacagctaaattatggaactgttttaagagaaatttgttctaaaaaatgactaaatggggatatactaatgattctcctatctttgcaaatgatttttactccttctcctttctgcttgttcactagtcaattattgttatgaccatgttgtaatcttttcgtattaagaaaaggctaggcttgaccctaatatattaaaaatatatcgcaaagttggtttatttatcctcatatgacaaaagtaaactatgagtaaaattatactgtgtcacatccaatctcttccaagtctcattaatacgatacccgatgaaaacgatatagtgaaactaaaattcgtttatgcgggtatatagttcacttagtgactttttttgacaataatctataggaaaaatctttttatagatttatggtgataatgacatgattgaatatggtcatggtgggtagttatattcaaaaatatatacctagaaggactgacttaactttatcaaacaataaagacaaaaatagacaacaattaccttcgtgctatatacctaattgtcattcctatcccttatcgcggtgcaccatatgttcaagttattgctgctatgcacatgtttatggtcatgatcattcaatagagaattttgaaatactgaaataatttcacttcaatattgttttaaaaatacattacttatcgatggaaaaaatagagaaagaatatcaaaagatctataataaacaatcaaggtattagagttcgtcttgcttggaactggggcaattttagaatctaacacgacatgcaagattgcatctattcctctagttcttggaatcatcgattcaatctcttgattgtaaatgctacctgtagttttattttgggaatgttttctattttatgagtcagcgggatattaaacccgagatcctctttcatagtagatattagattttgtgcttctccaccaccatatcatctctgcttttggaatttatagtcatgatagaaagtaaccaaattctaaatatgatgattaatattataggcaacgttggattttcctttttgaccctggatcatagaagaataatattggttttagttgtcacaatagtgctcttctatatatgaccttgaatgaagtgactaacttatacactcatacaaaaatgctaaaataaatggaaagacttgaaaaactatcatcgaattattgatgaatgaaaaggttctaaacgctatagtttggttgggtgtggatggatttggtagcagatgaaaataggcagtgcttttggaaggattagtgataaattaaaccatgatgatcgaaccaatagataacaaaaaagattagacctttgttactaacattcaaaacgttgataggcgacaatgatctcatcactattcatagaatgcaagttgtctgaccatctttttccagtgtatctacatttgtaaaggtctgaagttaaatatcttggtatgccatgagataagtgtaaatggccaaagaccccgtttgtaatatgaaggtggatgaaaagactgcagagcacatatcagaaattagcggaaacaagatatatctctgttcttctgtatgaaaacaacaattcgatcgatatcgatcaaaatatggatattgagacaaatcgcgaataaataaaaaaatcactcggcaatttcggatttaccctcatattttcttttaattgattctattctgccttgatatttttcagtatatcctgatttgcatgatatacaacagaagaatcgctcaatatctgcaaatgtcaatattttaggtttaccatagacaggtccatcacaaaaatcacaaataatgtttattgctaggccacttgtaattcttttctgaatttcatctatttcattttttagaatcttattctgaggatttttatcggtgttctcttttcttttggcattttcatcaaggtactgcaattgaatgaaattcttttcttttgattctatcttctcaaagtcaaaaaccggtaggatccccttgataaatcctacgttaaccaacctttcataacgtgcctttactgtaggagttgttattcctgtttcccttgatatttgtctaaatgactttctgccattctgtagtagtgattctagaatggatacatcgatttcatcgaggctgagtggcatttaacgatgtcaatttacccatcttctcatattattctttacatttgtaaagagtaggagtatgtctctactcttgcctgataagttcagccaaaataagaaattaaatctagtcaatattgtgcggctctaacgaatttgtatccagattcttctaatcttgcttgaatgtcgtgtttagttattgttaagggatcaaactcgacaatcactgtatttgttatattgtttatgtctattttcttgattccctttttatcttttaattgtttttcaatgatgggtatgcatgtagtacaatacattccgacaactctaaagtaggctttttcagaggatgtcaataattctatttttgtgtttatttaattaattgagctgctaaaaaggtaagtattctagtgtcagagaatcagcgattcaagaagattttaccgacataaactaattttacatttgtaaagccttgttgttatatatctatttattattatttattgtatggcaaaggatccaatatgcggaatgttcgttgaagaaaataaaaactccattcattatactaaagaaggaataacctattatttttgttcttctcaatgtttaaatgaattccttgaacccgagaaggccctaaaaaaactaaaaatacatgttataattagcatagcactgacaataccaatcgtgttgcttagcttgccacatatgattctacaactgggacatctttatccaatcgaaatgatgggatatatcaattatgtacttttagctttggctactccaatacaattttggattggatggcgtttttaccaaggattctgggatggtatcaaagcaaaagcatcaaatatggatacattgattgctattggaacaacagctgcatatgtatacagcgccatagttaccatcattcctggatactttccatttacagcggtatatttcgaaacagctgcaatcataattactcttatcttgataggaagacttcttgaaactaagacaaaagaaaaagcatcaagtgcagtgagaaagttattagatctaaaacccacgaatgcacatgtattaagacctgaaataagagaaaaaaattatgcaaacaaagatactaataataaaagtaataatgctttggatggttctagactcgagctagtttcaaaagagtttagagaacttgaaattccagtggaagaaatcatacaaggcgacttaatgatcatacgccccggtgaaagagttcctactgattgaatgataatggatggttcgtcttcgatagacgagtctgcgataacaggcgaaagcgtacctgttgacaaggtaaaaggcgacgaagtaattggagcaactattaacaagaacggcctcttaaaagtaaaagcaactaagattggtcaggatacagtattatcacaaataataacccttgtagaagaggccaaaacaggcaaagccaaagtagaaagaatggtagaccaggtagcaaagtattttgttccagccattgtaataatagcaattggagtgttcctcggttggtattttataggtaatgcaggattaacttattccatattggcatttgtctctgtcatgataatagcatgtccttgtgctttaggattggctacaccagccgcattaatgatgggtgcggcaaaaggcgctgaaaatggtatcttatataaaggcggcgagtatatagaaatggcaagtaaagtcaatttggtagtatttgataagacgggaacattaacagaaggaaaaccgtctgttactgacatcattacacttgatgaaatagatgataacgatcttttaagactagcagctataggagaatcaggttcagagcatcccttggctaaggctataatcgcaaaagcaaacgaaaaaggaatttctacagtttcgcctgattcatttgaagcggtagtaggttatggcctagagccagatactctaactatgatataacgataggaaatagaaaaataatgttagacaataatatttcaatttctgaaaacatcgaaacaaaacttttggaattagaaaaagatggtaaaactgcagtattagtctcaatagacaatcatttatcgggattaatcgcaatatctgataccataaagaaagacgccaaagaagcgatatttgacttaaaaaacctgggaattaaatcggtaatgcttactggagataatgaaagaacagcaaaggctgtcgcttcccgaattgggattgaaagagtaatagcccaagttttaccaagtcaaaaagaagagattataggcaatattcagagaaaagaaaacagagttgtagcaatggtaggtgacggaattaatgatgctccagcattagccagagcagatttgggaattgcaataggatctggaacagatgttgccaaagaaactggtggcgtaattttaataaacaacaatattagagacgttgtaaccgctttagaattaggaaagaaaactgtttcaaaaataaaacaaaaccttttctgggcttttgcttataatactggattgatacctattgcagctggtgcattggttcctattttgggactatctgtatttgggtggcttccaattcttgctggggttgcaatggccatgagctctgtcaccgttgttactaattctctatttttgggaagatataaaccaagaacaaaaaatagattgaaaacaaaattcgtttagacatcatcttgttctattctactctattttgatgttctaaaacgactatccttggattacctatatctactgattatgctgttacaacacactatcagttactgctcttacagaactcttaattgcctcagagattctgaaaaatgttagaagttttgtaataaaaccctcattcttggatagaacaaacattttgctgaataattatcgatattcgattgttcaattatactgtaggtatcttctcagatctcttaatttgaagtcattgttgccaatcgttgtattatcaaaatccttaaactggctgatactcactttcacttttagttcagatcttggtaaaagtaataatctctgtgagccaaatacaaccattatatgttgaaatttgaaatctaattagtgataaagaaataagtgaacaataaaaaaaaggttagttgtttgattgtcctaatgcattacttccggtgttagcttggaattggaagtttaagttgttgcctgaaagtatggagtctccaccagaaactacttgactattctgttttgatttttgagattgactaattatttgtttcgctttgttactcttttttgctaatgcgtcttctgaaattgccaatggggctaagatcaaagctagtgcaagaacaactgatgttgatactagtaatgttttacttgtattcatacttgtaaactatatcattacaattcaacttatattggatattttagatatttctattaatctttagaggaaaaattaaacagaaaaaatttctaaacctataatccgaataacccaaaggtccagtaaaggtgtgatggaaaatcaaggatcaagtttatggaaaaagatttaacatggtatataatatttgaatgtcacttttgatacttaatcatttacctgtttcttgtcaaattctacttgtttactttttttccaaatatctgcaatcatctcggatgattttaccaattatcatatttacataaactaattaaaattacatatactaattctgaattaaatccctcagctaggctgttcaactaagatacgtaaaccctagactaacgaatctgtattataatcgatttagtcaaagatagtatcggaattttgagtccgttggattaatactagtgtatacacataaaaagcactttacccgacataccgatttgaatatagtcatctgtaaatcctacatatctagggcacttgtaatagagttatagatacgatcatctgattgttaatattattgttgttggctttgttaggagtataatagtaatttgaagtacaaaaaaagaagagataaatgaaaaaagctcccctaaagagtattttagttgggaggagatagaattactaacacatattgttgcagctaaaatacagaatttaaacaaaaagtatgatataatattaggaataacaaatggtggaatcattcctgccagattaatggccctagaacttgatataaatcatatagagttaatacctattagaaataaaaaactgcatattgaagaaatgcctcaattaatgaccaataaaaagtatcttgtagtggatgaaatatatgatactggtgaaacattttctaaagtcaaatgtgcaatgcaagattttgattgtgattatgcgtttcttatgaggagattcaacgacccgaatggcaataaacctggcaatgaaacagcatttatcggaaaaatattaaatcattacaaatggatcgtttttccatgggaacaaaaaaacattatcatatgatagaaaaatgtttaggaatttctaatttgtcaaattggattgcactagtgatcaacctgtccataaaactataagaactatgcttctccaaggaaccaagatacctgatcaaaaagtatgattaaagacagtagcaataaataggctctgttcacttaacggtttctctccttgttgtgataatctacaaatagattcaaccaattgattatgtgatttagattacaatttttcattttgcatggaaagtagtcatcgaaaccttcagtcctatccttgatgtattacatcgtcttttctatgatacttttctcaaaagaagaatgaatgtggtgatcaaggttcaagaacctacatgcttgaggataccacgtacctctgtctgtagatactggatgctttccgtgattccttactaaaccggaaatgaatctctctgctatgagcatgtttctttccttagatatgtttagtgctagaatttgtctgtttcttggttctatggctacccaaagccagatatattgagaaccaaccttgatcagtgtttcatctataatgtattctgcgatcctttttctctttgatgatatctttttgggatgatacttttgaatccagttccaaatagaaacatgatttcgtttgaaagtataagataatctttcagctgctcttctaagcgatagacctgaaaaatacaaatacagcccatagtatactttgaaggtgttttgtttctggtaatcaaaaagaagataaagtatcttaaagctataaaatttctttaagtgaacagagccaataaatacgatattcagctaaaatattaccaaatcagaaagaaatgatcaaatataataaactatgttaattataaggggagtatatgagtagtagagattttaacccatttgactggtataagaatttctttggaaggcatccaaacaagaatagaggagggggattcttcgatgattactttgccggatttgaagagatgcaagaggagatggagagaatatttaaacaatttaataatatacaatccaatgcgcccaaggaattggtaagagaatatcaagcgccggatggtaccaaagtgagagaagtcggaccaatagtttatggatattcgatgacaattggacctgatggcaaaccacatataagccaatttggaaacgttaagaatttggctggaggatcaaacaagcaagaactaaatctcgctggtatgggctcaggaccagcattaacagctgaaagagaacctctagcggatctaaatactactgaaaaggaaattaaagttatagtagaaatgcccggaataaaaaaagaagatattaaaataaatgcaactgaaggcttggtggaaattatgactactggttctccaagaaaatatcacaaaagtatagaaataccaacagaagcagatatcgattcagctagatctaactatactaatggtattttagaagtcgttttcaataaaaaagaaaatgtgaaaccaaaaggtaaggaagtaaaggtagaataatgttgcacaattgccattaattttttgttcatgcggtacatgagtctttcaaaataataaactaaaatggcagaaggagagcacttgaagaagcttcaaaccgatgttgaagatcttcttaaacgtataaagcaagaacattaaaaagagttatcctcaaaaattgtctcagtagcaagcctagatgaatggtcaactattatggaataattcaggtgattctttagttttatttaacataatgtaatgtctatgctgctgcatattcctaatgatagattcaaagcttccataacgcctttgaaattaaatcagtctattatagttgtataacatcatgttcaaaagatttgaaagtaaataagagtaaataaattaatgactttgtgtgattgataattgataaccatacaaacagtaaagtcattcaagagaatggtccgatttcttaacctcatactacaaaacacaccagatcaataattgtcattgcaattctctttaggtcaaagattgatacttcctttcctaaacctttctttacaacttgatgtttagtttagtttacatatgattctattgtacccattattcttttatattaataatgatcatatgtattgactattctacaattcgtagtacagtaactgttaccctatatgagtaacgaatgcccgttaataaaaagctagatagcacgggttgaggctattgagtaaatagttactacagttagatattctaacttgatggttgtaatttacataattacattttcccacatatgaatagaatggcgttttgacaggtaataagtcggaattctaggtcacacgcttcaacatggctcctccttcatagctagtaatagtgagtattttttctcagctttcctctgagactgaagagagttgtaattagtgaattgataagcatcggccttataagcatcggcgccagaaaaatatcgataacatagagacaagtctattcatcaatttagtattttgtagaaaccgaactattggtaatttaatttaacctccaaaatcaattgaggtatatgtgatagaagtaaaatcaatagctagagttgaaccatgttccattcaaagaataaaagccggaggtcctagcacggttggatgaagacaatagtggacatacaaatcaatggactcaaccatttgtacaatcaaatacatcacctgttgtcctttgtgacccctgtacagttaagcctacttttacactatctaatttttcacctttaaacatcctacaatgcaaaatagaaatggcaattaatactaatttgattttgagataaaatattattcctaggtacaacactgctttcacaaataacaacttgattaggttgatttccaattcttacttcatctagtgtcgcaaattactattgcatccataaagcaaggtagtataagtaaaacaagataaaatatttgatgattcgagttcacaattagtgggtgatgatctacgagtctctcacctcataatctacaatactcttaatgagcagcgtctaccccctagagtctacaaaaaaaaccgaatatgaacaattagaatctttatctatgttctgagattttaggaatacccacatgattctcaccatactatagatcttgatgttttttatcgcagtgaacttgcacacggatagggccttcatctactaaacaacacgcaaatttagcagaaaagtccgattaggggtttgtctagtccgtaaagtccataatttcagttgcactaatagccaaaaagctttgaaagccaagccagagtgaatcaggagggactatgcacgtgaatttgcaatactcaattttaaagatgaaatgaaagataaaagcatcggactgtcatagttaagtcattgcatcatcttggaaaaaaaattaatttatccatctcagttcttgatttggtaatggtaaatgctggcagtactccgaaccagtcaatgcaaaatagtttggatttagctcgacatgtggaacgatgggggtataatcgatattggctggcagaacatcataacatacctggtatagcaagtgcagctacctcagtgctcatagggtttattgcaggaggtacttctaccattcgagttggctcaggtgggataatgcttccaaatcacagtcctcttgtcatagccgagcaatttggaaccctggagagtttgtatcctggtaggattgatctaggtataggtcgagccccaggaactgataggcttacttctatggccttgaggcgtggtattctgaatgaatcagaagaagattttcccaacagtgtagaggaattaatgaactatctggaaccccaaaccatcacgaaggaagtaagggctaccccaggagagggattgaatatacctatctggcttttgggttctagtatattcagtgctcaactagccgcggcgcggggattaccatttgcatttgcaagccattttgctcctgcctacttggaatctgctgtaaatatatacaaagaacgatttcagccatctaaaactctacaagagccttatgtcatggctgcagtaaatgtatttgcagctgatactgacgaggaggcaagtcgtttattcacatctgtacaactaatggcattgggaatgattagaaaaaaccatggactactacaacccccaatagacaacatcgatgagatatgggaccaacttgaaaaatatgcagtgggtgaacggctcaaatactcatttgttggaaatccttctaaggttaagaagggtttagaatcctttttgaacagaactcaggtagatgaaatcatgggtgtttctcatatttacgaccatactgcaagacttcactcttttgagattttatcttcactctgacaataacaaaatatagcagatcactatccctgagctattacaaaaatagttaacctgctccctttctaaatttgtcacatatgtcttgatatttcgatgattatttgattctataaaattgccattatttgttttgtaatacaaggcaattcaaatcgtatggccctagtaatattaccttattctatgttgcagtagggccacgacgccaataaaaccagcaacataataaccaaaagtctgatggttcaactcaatgacttgaattttggcattaaatagaatgatgttcaaaatattcaaaagggctgttggttgtataaagctggcgttcaaatttcgatttaataatgatgtctgcaaatactatgttgtatttacactcaacgatagagagtgctaagtgaatctcctaacttttgacccattgaaggcgcagaacaactcattaataatacaaattcagaaacggttgatagttccatctttgaacaaacggatatttccttgctaaagaatggatcatacaatgttaatcgacattcaagttatttattaccgttgccactaattacaagacaagatatacaagataggagaactcaccattctttattgttgaagaaataaaagaagtagtgattacagagctattgtgaccagaaaattccgccagttgtagacaatcttttaataattactaattaatcaccaatacatggataaaatttctaattttgacaaacaatatagaaaacctgcttctctgatgattgtttttgtaatatggtcatcgattttttctatgattgtttcaattaatactggagatttagctattagtttattcccaacagtttttgctcaaaagaatcagacaggagtcggagatgttcaaaaagagtctttggtaagagatgaatcgttgcaaaaacaggacacaataaacgatgataataaacttcaacccggtatagttaccaatcctggaccccagaactgtggaataaatccaaatgcaccgccatgctgtacacctggagaggataaaggatgtatcggcgaagtaccccagaactgtggaataaatccaaatgcaccgccatgctgtacacctggagaggataaaggatgtatcggcgaagtaccccagaactgtggaataaatccaaatgcaccgccatgctgtacacctggagaggataaaggatgtatcggcgaagtaccccagaactgtggaataaatccaaatgcaccgccatgctgtacacctggagaggataaaggatgtatcggtaatgatgataatgtaagtattttgcaattaggaacaaatccacaaaatctaaaaccaggagacgaatttaaagtgctggcaacggtaataaataacttgaatgtcccaataaaatatactggagcccaatgtgggggttcacctttagatattcaatttgataacaatgtaaatattaactatgccatagcatgtcaggcaatatctacagaaacactagatactcatgaaacaacaacagtacaagggaaaggatatgaaatattaacagcagaaaaccctggtaaggtgaatgcacaagtcacattcaattatggagtagaaggcgacgatgctaatcagaaacaagtagcagaatcgttttcatttgatataataaattaacagataacatccatcgcaattcacctttcctcaaaatctttatcaaacaacttttttatctgtcaatatgttaccttttgtcatataattataaagttcataggacaattttatgatttccaccgactcagcgctatcttctattaaataggctggtaagtttttttatcctcgttcattaacaattacacataagcttaatagttaatctttcatcctattatctgacaaaaccatgaataagtcaacacaatcgattaccttatttgtcctcttgtttatcttattttcatttagttgttcatcgtctactatttttctgtcatacggcgcttatttcaaagcacctgcatcacccggtggtccggttctaaatgaccctaaccttgtggtcgaaaaagtcaacaacaaaccattaaacattcctacatccttagcgttctttggacacaatgatatacttgtaactgaaaaagagacgggtaaggtaattagagtattggacggacaagttaaagagaatgttcctcttctagacgttgaagtggctactgccatggagagaggtttgttgggattgactcttttaaaaagcatgaacgacactaaaacgtatgtttttctatattacacagaatcaggtggtggtaaagatggtgatgattttaatgccggtgtagagcctgtgggtaacagattatacaaatatgaatatcatgacggaaaattgataaatcctacgcttcttttggacttgcctgctacccctgtgaacaataaaggggagcacaatgggggcaaggtgataattggccctgatagcaacatttacacggtaattggagatgtgggtgctcacagaacagaatctcaaaatgttgttaatggtcctgcagctgatggtacaagcggcatcatcaggctaactcctactggtgaatttgccggagaccctatttttggaactgagggtccattaaggtactattatgcaatgggtatccgcaacagctttggtatggactttgatcctgtatcaggtaccttatgggcaacagaaaacggaccagcagcgggagacgaaataaatatggttgaacctggctttaacagtggatgggctcaaatccaaggatttgctgatagcgatattcttaatcgcggtaaatctgcagaagatttgttgattttaggagatgccaaatacagtgaccctgaattttcttggaacactactgttggaataaccgatgctaaatttttctcatctgacaaactaggtaaacagtatgagaacaacctatttgtgggggatattaacaacggctatatctaccgattcactctaaattcagaaagaaatgctatcgaaataaacagaagctcctatgagggaaatttggatatcttggctgataaacaggtaaatactccgaaagaggttattccactcatattcggaagtggttttggaggtattacagatttagaagtgggaccagatggatatctatacgttttgacttatttcggagaaatctatagaatcattccaaagttagaccttattgattccgataattctttacatgcaaataaatcacagtcaccactgacccaaaccgcaccttccgtttctaattcaaccatagtacaaataatgggtattgagggtgacaagtcctacaatcctaatcctgtagtggtccaagaaggtcaaacaattctatgggtaaacggtgatgcaatctctcacacagtaacctcaaattctcataaaaatggatacgaaaataactctggaatattgtttgactctaccgcaatattgccgggacacttttatagtaaggtgtttgttctatctggcacttattcgtattattgtttctaccatcctaccatgattgggcaagtaatagtagagtaagtgactatttagttctgatgaactaataaatcattgattacgaattattgtattgattaaaaatttgtttcacctgattacaaaaggactgttaggtgataacaaggaaaaaaatccatgacagaagcaaaaatataaaaagaaatattaacagatgaaaaaatatggtacaacggctagaggaatgttatagttattttaagattttcctatagttattgggtattattttatatttcatcgataccatcaaaccaaaaaaatcaaaaatgctttattattctatcaatatccgtttgctctatctgatccacagttacttccgcttccaaaacaatcttttattataattattatatgatttattatactacttttaatgataggttctatatggtttgtttgtaatcagtgtttattaaatggtatctaagaaagttacaccaaaggatgataagaaaggattagcatctgctgataaggaaacacaaaagaaggtcgcaagtaaaggtggaaaggccaaagccaaggccactagtacaaaggccactagtacaaaggccactagtacaaaggccactagtacaaaggccactagtacaaaggccactagtacaaaggccactagtcctaagaagaccagtggcagtgctaagaaaaaataatatctaattcatagtatattatttttaataaattttatttctttattaatcgtgaaaccatatgaaataaccgcatgtttaattaaataagatctgtcttatgataagtcctttttgcaaataagagtatttcgtaaatccatattgtttttggttaatttataaaaacaactgtttaagtgattcatatcttttgatataatcaattccttttggagatataacatagtgaggaacatctgtgtatttactattcaataagagattcttattagtaacgggtttaatgaactgattagataataatgatgataaagtatgtttatttgttgagattctgtacttagttagagggataggctggttttctaaataaagcagagcatcatatacacattcatagtgggtcctgtacccgtttaattttactttttggctacgaattgccactgtcacgcctgattcaaacatcataaaataaatacaaatcttaatacaaccatcgattaaaaatatcctattattattgcagttagatgtagtagtaaaatcattgataatatagtcaagaaagctaaaaagtaattttgtcagcgcaaattaaggctttccaaataaaatctaccatactttcatcttcagtgttctatataaatagtaattttaaaaaatatgattattctaagtagatctttccaaagttgactttatcaaataccaccgaaataatggcttcataatattaatactgccgcactaactaccgttgtccataggccatccttgtttcctgcagctgactgggtgaaattttgtgttttgtaaatctttcctgaaagtttccattgttcttcgttttgatcccatgaaagtgttggatcagtgggtaatccgattgttgtggcaagcatttccatggccaaatcctctgcataatctccggccttagaagctgtttctccagttgagtggtgttctgacaaatacccatattgagcatcatctgctggcctagctaatccaatggatgcggcaattagtctgtttggctcattagtagctgatctcgccattaccgtaaaaacaatttgtcctggtttcagatatcttctgccttctcctctatttactatcttgcactgtggtggtttgatactagataccgataccaaattcagatcgcttatcgaagcatcacgtaaggcaagttcaaagctagtgagataatctttgtgggtacctctacctttagtaaaaaacataattttcggaatatatgccatagggtctgacaatggtatttttttgcaaagttcattctctctaaccatctctagacaagttgtgtaaaggataggataaaaacatgatttttgaattgatcgattgattaaccgtctctaagatgtatagatttttttgccttatagataaatcgacttacctatagacatgtaataaagatccaagaaattgttatctgacaatgtaaatcgggttttagactttagaatggactctaattaatgataaagttaagaatccaggtggttgatattttttttgcattatcatctttgaacttggtattatgtatgcacagaatttttatagtaatcttatcaattaatccatgtatataactagaaaagtatgatacattctattttctcaattatcattacttttaccgatcacgttattcattgaaaatttgaattgattaccttatacaatggagtcatattgaggatttgttattgatgatttaccagcttatatcggtacatctcaatatcgcagtgaatggtgatttttctcaatgcacttcaaacagagttatacatcaacgctttccactaataagattaaaatatataatggtgaactttgatttagtggcaaaagtcatagctttccattcgtacaaaggcggaacaggtaaaaccactttagcagtaaacctttctgcaaacctggcgtcaaagggataccatgttttacttgttgatatggatgtctatgctccaagcttatatgtttattttaatattcaaccaaagaaatggattaatgattacttgaatgataaaattaccttttgtgattccatttatgatttctctcatgtattgaaagaatttgattcaaacacgcagattaacgatataaaaggctcctttcatgctgttttttctaatccatcaaagaaagaaataaccgatttagattccgttatgaggaaggattcatcaaagtctcacatgttaaaaaaaatgttatttttaaaagaaacaggtattacagttacagactatgattatatcattctggatacaagtccgggtattcgatattggtcaattaattccttggccatttcggatactatctttttgtcactaaagatggataatatagacgtggaaggtactaaacatatggctatggatgtgtatggttcttttacaagttatggaactagatcttatttgttgttgaatagagttgcaggctattgcgagcctccagtaacccttgatacaggtaactctaagtatggtgaaaatatttcttcttttaggtctttgctattagaacaaaatgaaacaattaataatttggaaaagttaataaaaatggatgtagtttcgatgatcccttgttattgtgatatgcaatttgaaagacaggaatatttaactgtcttaaaaaatccaaatcaccctttttcaaagaaagtcgatgaattatcaaagaaaatcgaatagttctgatatcaaatccggctgttgaggatcgctcagtctcaaagctcatagacctctcaaaagaaaaaaagaaatatctacctaacatagtaatgtagatgaaacatttccctggtaatgacataataggtagaaacctacagcgacctgatcttggagtgtatctaatttctgggccaaagttatcgggaaaattacactattgcaataattttatattaaatggcctgacagacggggttttttgtatttgtatcagctcttcattcatagaaaaaaaatataaaagcatttttttttcggggttggagagcttgtgtcttaatttaacagtgttaaatccatatacgttaaagggatatgatggagccagttttgaaaatagtcaagcgctcacacatctttttgaagaggttagacaaataattgaaacccacataaatcgacctgtctactttgtgttaagttcattgactaactttctagaaaattttaacgatcaagatgtaaccaaatttgtaactagtttggtctttctgcttaaaaaccatgaggtaaattcaatattttctattgatagcacagaccccaattcatccatatttattaacaaggtagcacatctttttgacggactatttgaaactaagttaccttcagatccttctcagtcgcaaaagtacataaaactagtatctatgtttgggaatactaaatgtaaatcagattggataaattatacactggacgataacaatatcataacatctattagtaatcaaactagactaatttgcaatttatgtaaggaacagattgatgaatctccagtattctatcaagaactttcttttcatcaggaacatctagccatttacatgaaattagttaatttttacggaaattctaaaattgcagaatttggatcatctggaattttatatacaaatttcttctttattgatatagttggattgtcagatccttctctgtcggtcaaaaatcagatagaaaagatccagatactaaataatttgatcaattcgtgtaattcttataaaaaggaccgagagaagaaaattcttcctactggagatggtatggcgatcggtttcttaaccgatcctaaactacctgtagaattaagcctggaacttcacaaaaaactaggaatacacaattcaaattcatcaaatcaatctataatacaagtgcgaattggaattggttcgggacatgtttttatagtcaatgatttgaatgataatcaaaatttatggggtccaggtataatacttgctaggagagttatggatttaggtgatcaaggtcacatattgatcgaaggaagttttgcaaataacttatttagtattgacagtgaattaaagaaagacatacattatctcgggagttactgtataaaacacaaccaaaaaattgatgtttattccctatataatcagtacgccggcaatgcagaaattccacaaaaatttttagatttacctaaatccatttgatacattctatattatttccactaaatcttcaaattcttaattgttaaataaccaatagcatccttatggaattcatttcctattgctggctaaattgtattactaaccaaatttagtaatactgtttctttttaaaggcttgtctttaaacatttacaattattggcgataatccaatttttattgctcgtattagtaccatcgtatcgtctttgcctaagaataatggtcttcctttttagtgagggacctcttaacagatattaattgcatatcagtcatttttgagaatgtttttatatctttatcataccaaaaacctgtatggctatttttcttgatgttcataaggtgccatttaaagaagaaaatctccaagagctggttaaggctcccatagacgaatatggggtcacacacgtcaacttattctacaatatggaagctggtgtatgtttttgtttattaagtgctcccgataaagaagccgtaattaagcatcacgataaggttaacatagaatgtgaatggattacagaagttagtatggcaacaggtaatgaatccctaaaatttaccaccaagtgaacttgtatatatgcataagattaacttggggtacaaatcgggtgttagaataatggaaattgacataaaaacaaaacaaaaaaccttatcaattatttaaaatttgttaccttcgggttccattagaaggtaaatttgaaaagataatcttatattcgtatgtgggttaataaccttaagttattaaaaatgcccacaggttctggcataaaggaagtcaatgtaaaatatacccttgatgaatccatcaatcttatacttaaaatattttctaataccgagcagcatttggaaataattatagatcatgattggttatgccatttagtggagtattcatcaattcttacattcttcaggaaattgaaattgcgcaatatcgacatcaagatcgtagtcgaaattgacaagaagagcgcaaattattctaagcgtctaatgaaattttctgatataagacattcagataatctagaggggtgcagctttaggaacgagcactcatattgtttctgccacttctctgaaaatggattaagcgatctggaacaagaaatcgagccactggagaaattgactcaattcttttacgtggataacaggaattttgtcaaacaacaagattctttatttaagcatctatggggtgattccgttccagcaagggaaaaaataacagaaattgaaaaaagtgtaatggaggtcatactaaaccatgaaccccagtcagaaatagatgccaattcaagtgaaatactttttcggattgtgggatcttgtgtagatcaaatactgatcttaattccctcaactaatctcttttgggatttttacaatagcaatctgtttgtctcaatctcaaagatgttagtcaaagacgtgacggtaaagatcctaattcacttggaagaaggacaaacggccgtaaaggatgaaatacgatataaactcaaggaactatctcaggatttggacattaatactaattttttctccaaaaaaattcctcaattacatctatcaataattgtagacaatgttgttttggtagaaattgattacgggaacgaaggatttgttctttcaacaaaagaacttgacccaatagtgtccttttccattagtgatactcgggtatcgtcctcaacttcagtatttgacattttgtggatacagtctgattttgaaagacaaaaaaagattaaacaaacctattttgatatttttaaaggatttaatatgaaaagcgagaattacagtagagattggaattttgaaaaaaaaagtaacaaataatctagcttctatgcccttaatattcttttaaataacatccttcgttggtttttttcatattgattgaaacattgattagatttctagaatctaaccattttgcctactattagtgtgtttctattaatgggctcataccagtgcttctatgttcaaagaattctgacgttttccatcatgtctacaaatcaatattataacaagatatgcatgcaggtaaatttatcaatatttttcgataatttatttcgtttatttaatgatcaatgaaattcacattaatgaaataaacaagagggagagttaaacgaaattaaactgtatttttattccatcatgatcgtaaacataaaatgaagttttttggtgaaaatctgaatcaagtatcttttcatccatcgagataccattattaatgaggtggtttttgaatgagtctttctctttattgttattgggtatcatgattgcaaaatggtctagtcctactttactcaagtcatttgcactattaggtaggatgtttgtcccaatccatgcatttgtggcaatgtgatgatgatatctatctgcggcaaaaaaatgggctcctggatacgaagcagtatggtaaagtccaatcatatcctgatagaatttcttggctttagtaaggtttgatacgtgtaaatgaacatgacctatcgatgttttctcaggaagaccattccatgcttcataactttcatgatttaataaatccttgacatcgagtgattctgttaccatgtgtattttgtttgcatcagtccatgtccattcagatggtagcctatcatggtaaatctcgatcccgttattatcggggtcgtggagatataaagactcagagacggcgtggtcggccaaaccttcatagtatcgtggatcgagatttttcttaatgtgctggagaaatgatgctaaaaattttctttcaggcagtaatatggcaaaatgataaagccctgcctctctttttgttaggctaggattgtttgatacgctactattgacaccatctatctgactcaagactagcaatgatgaattctcatcctgtccaggctcacgagaaccaagacatactatattttcttttggtttgttttctaatatcttaaatcctaaaatggattggtaaaaatctatggaattctgtaaattagagacttttaggtgaacatgatcaatctttaaagatgggtcggcgataaatctattttcttcatcattattactatatttactattataactaccattcatatatatattttaattctgatctatttaataccaaatgccatttcaaaagatcaaaataaaaaactaattagataaaatatgggaaatttgttttgaggtagtaaatttctcttttgatttctttctaacggaacatgggattttatcatagtatagctgttagtaacaagaagtagttttatttgactctaaatgatcttgcacattatattgtaacctgtgatcatactagttggtaattcaaataaaaaaagtagtttagtttactgcatgagaataagtaaaaaattacttcgttcttactttgtactcattaattgtcctcttatttcaccatctggatattgaactgtgtgaatgttaacataagtactattacccttgattgcagtcattaagtcagaaactgtttttccttgtaacggtccttccaaattaattcctgttagagtaccatttatagtaagcccattttgatttggattctgcgtgggatcgaatgtgaatagagtcactgcaattggtccgttttctcctagaattccactgtggatatgagccgcggttacattctggatgccagaagcattaacggaaaagtctagtgtatcattgtttgggagaatggggctaaatcttgcctctcctgttgcttgagtatccactgctggaacttcctcttgaccagtaaggttagcagcaaaatcgtggtttgcaaatgctgttgatgtacttgaaactgctgataccgcaaagacacttcctagtgctagagcgatgcttagaaataacattctgttatttttgattgtcatccacttaatgtcaataatgtggtatataaccactttgttaagcttctcagtcttctagaaatctatcacggtccaaaccatcactaaaaatattttggttagttggagcaatatttatcaaataaccatatttggataattctaaatactatctacatgactttgcatatttttcaaagtgtggatggtcatgtcttgtgattctatatttttgtcgatttatgattttacttcccaagaagagtttcattccaaaaccattacgtcatgttacaataccaaaatggccgcagattacaaaggtggtaataattatcctattgtaaattgatatttgttgaccatagatgtcggtaaacccatatatctaagacccaagacctgatgagggttccaatgatggaaactctatgaaaaaagtatagtagtcaatcccatagtaggatgacgctataatttttagaccttatcacttgaactattgataaccggccattttttcttacgtaatgaacccatcatggtgtgattcagattgagatgagcttgtacaagttctttgggcgtcaaagccatccactgatttagcgaaatatcttgaaagcgagaacttttaaacatctccaggaaacgcaatggtttatcaccaatattttcgatatagtgacccatcgcaaatgggacatacccgacatcgccagcctggtagtcaaaagtccgtgctttaccttctgctgcaaatactcccatccgggcagaaccttcaatataatattgccattcatcagtatttggatgccaatgcatctctcgcattcctcttggcttgacctccacaagtcctgccgctatgttggttgcttctgggaaattggacgaatcgatcagacgaaccgtaccaccacaggtcgccaatggctcttgattcagaaaatgatagctaaaagatctttgtccctgattgctaacgatcttgtcagatgctaatggcccaggtacctcggtaggaaacatgtagtacttgtgatcaagttcgtgcatcagaatattggcgaattcgatcatttgcaagccaaaattctttgctagtacttctttgggggtatgggcaaaccaatcggtaatgagaaacgttgaatcttcagaaaagttgccatcatcaaaaacgaggagaaactcgcagccttcttctaatccttggatcgaatgaggaataccgggaggaaaataccatatatctccagtacctacatcgtctaggaagttacaaccatcttggtcaactgcacttattcgtgcccttccgttgagcatatacgcccactccgcctccttatgccagtgcaattcgcgtactcctccggcatttaaccgcatgttaacgccagcgagcgtcgtagcgataggtaactctcttgctgttacttgtcgtgtccatccacctttctgaagtcgattgtgtgccaaagaaaatgaaaatttcaaattcggtaatgtacctgaatcaggtactaggtggtgtaagaatatcggggttctgacggtccaattctttattacgtggaccaggatcggttccaccagtatcaggtctaatagggtctggtatggatctttctgagacccttttataacaccacttcttgattagggataataaggctggtattattcatcccactctttgatgaccatgaacaactaaaggttttcttatcttgatttaccttgttagttttaaaatatttccaaatatctgccattttttgcatcatatacgtaaagccaaaccaaggaatgatttatacttagtggaatacgggatgctggtatgtatcagaataatcccaccaaagtcaaattagtaatttgaaaattgcaattcaaatggcaaaatttatttgcagtaatgtgctgacctttttgattcatatgccacgagcctgtcagaatgatcttgcaaggtatactatactgtctcaatattagtaaagagataaattgaaaataagatgtttatccatactgtccttttggatctctcctataaacgggacaactttatcaaatatcaaatatcttttaagcgccatcattttcgtccaaatgggatatttatggtggtactgctgaatagttatcggatatggaccatatttgtaaacaggcaaggataaatttgaattccaataaaaaaaatgccgtgaatatagaaaaaaataacacgaagataaatgataaagttagattgtcattaaactaattcttgtgttttaaacgggttaaattttaccataaactaagaaaggacgacctccacaattaatctcatgagcgaagtatatgcaatttctgcagtaactctaattatcagaaacatgaaaagatcttgtagcttttactctaaagtacctggttttgaattgatttatggtgggtctattgatgatccgtttactacttatcagattggaaagcgtaagcagcatatgtatttgaacctcgaactcgaaggttctgcaagtagcacttgttttagtaagtgtcagcctagattttttggtagaataattttttacacggcggatgtagacaaattatattcgtattttgtcaataacccgtctttctcgaatttaattctgcttgttcacgaaccagtggatgccccttggggagaaaggtatttccatataagggaaccagatggacatgaactttcattcgctcaccctatgaaaaagaaacctatccagcagaattaatatgattaattgtctctctgaatttgaaattatgattattgataagcgaatttcaatgtcagttccattaccatttaaagcgatttattttgttcagatcgtgttatctgctattgagatgaatgagtattgaacaatgtcctagaggttgatgttgatattttaaacggatttactcctaaatctggtaatctactctggccaaaaaacataaaattttttagtcgtctagaatttcaagaacgcaaaaggatgaaataatattttctgcaaagcgttacaatttttatactatgatgtaaatgtaaaggagtatgtatgctttaaggttaatactattggtctgtatgcttgcaaccataacttttatttctggaataataggattttcgcttcaaatatatgctaacactccaacaacagcggagcttcctgcaaccgttggaaacgcatcaccatcagatttgggattaacaaatagtaccgtgccagcagaaaacacaacaacagtaacacccgtaactcctctgtagcagatgagaggaaaatttagtaaaagattggataacatactcacaaaatagaaacatgctggaatcactatcagggaattgggaaaattaaataggtaatgcaataatagatatatcattgatattcaaaatatttatttaatatactgttgactctttgactatgaaatttttaatacgagtttcctttcctactttacttggaaacgaaatggtaaatgatccaacctttttaaaaaaaatagaagaacatataagaaacacaaagtcagaatctgcattttttaccctttctgatggagaaaggactgctatgtttgtaatggatatatcctctcctgaccaaatgtataacgcttgtgaacctttgttaatgctaggcggaaaggtccaccgggatatgataatgaccctagatgacataaaaaaaggacagtaacttttttataaatcgctactaatttccatttttatatgaattattgttacctttacaggttagattgggttgtcttgaagaccatgatgttggatctatccaaaaatgtgttccactattaaaaataacagttcacaaaaaggagtttaaagatcgatttatgctatggatagcaaaagcctttttaacttgctgatttaacaatgagaagtgaacaggagttatataattgtcgtaatgaccctagtggtgccaattttcttaattgcattaaatcaaaatctatcttatccattgcaagagtatgcacaataaacaacactgctaatactatttctagtaatgttacatcagatatggccaataaagtcatatctgaacagccaattgttcttcgtggaattgtctcatccgaagattttaataatgtgactttgaaagctggggatgatccacatagtgcaccactgcttcctaatagggatgacgaaacaatataatctggtatagtaacgtttactgcaacgaaacaggtggaagcgggtattagccacagactgaatattgacaataatactttttctcagcttgatacagatagacttggagaactatattctggataccatactgacacaggagaacgcggaacccccggtgtcttaagtgctccgtcagctatcgtgactgattatggcactgcatctccatatttctctgcatccattcctttcgtgggtgattcagtatggctgagaacgattaacggcgaaccttttattgcagtatgtgaactatttgcaaagataattcaacctgaaggagttgtcaatctggaaacagccctgattgattgatcctactaacatctatcctcagatggttttttcctaacgattgccttttgggaattgcttttatggtgggttaaagaacacgggttattctcgctccgaaaaataatttgaatgacagatggagacataatgataagatttaatgattgtgattattttcttactctaattttttttgatcatttgcaactttgatcatattctccttttcatggtttaattcatcatcagtcaagttgatggccgatattattgtgggattagccccatttggaggatcatcaataaaaatgattacgtgggtagacgtctttaatatactaattactgattcatcatatgatggcaggttcaattcgagatcttttattggaaccacagatcctagatcgtcaatatccagtaaagtaacatttaccttgtgttctacatcgctaattttattaatcttaactagcactaatataatacatcgccatctttaatacatttttctactggccagatatcatatacgtaggaaccagggggatattttacatgataatacgactcggaagttaatctttcatactattagacgctctatatgttacataaggtcaacgcaaagatataaaaatcaaatcttttttgaaacagtctaaattaaccagatcaatgagaataaccatgacattagattaaccatacgaaataatatcacatgaagatcataaaataattgaaatcaccaattttgctaggtgtaatcacaaacatcagtatcctatttttgtttcggtgtcctgagaccgtatttgatgcttaatatgatggtgaacatcgtaataattctatcttatgttattattacataatgtaagaaaactttatataatgtaatgtgtattacatatgtaggtgtatatgataaatgagcaataaagacattataccaagcgattggattagcagattctttgagacaggtctaggaaaaggcagaggaagaggattaggattgtttaacagagatgcattcagcgattttgatgatatccataaggaaatgaatagaatgtttgatgtatttaatgatatctcaaataacgccccaaaagaactcgtaagagaatatgaaacaaaagaaggtggtaaagttagagaagtagggccaatagtgtatggatattcaatgactatcgggtccgatggtaaacctcatgttcgggaatttggaaatatcaaatctttgaatgacagttctgtaaaaaaaataggaacacaacctgataatatctcccaaatatctgcagaaagagagccattagttgatgtgaacttgaccgataaagaagtcaaagtagtggttgaaatgcccggtatcagaaaagaagacataaaagtgaaagcatatgactcgcaagttgaagtaacaacatcaaaggatgctcaaagaaaatatcataagaatatagaacttccagagctagcagaaattgagactgcaagatcagcatataacaatggcatattggaaataaccttcgacaaaaagaaagttactaaacccgcaggtaaggaaatcaaaatagagtagatacaattacattccagacattcaataattcatttttttagcaattttctaaaataataatcacatttcagttttattttgttcaaaagcatttgatattaacaatattttatatgaaggcgagtgtatgcggtcataatcgaaaatagaccaggataaacagtaaggaatctaaaactaccagtcattcacctttctcaagaaccttttaatcctatttggataccatctgttctaaaaaaatgtcaaaaggcctttacaaatcatgaaaaatataaaaagtaaatggtgtatctataacatggataccctggaatttgatctttctacgatagaggcgcatcttagatataatctattaatttctctaataactcctagaccaatcgccttcatttctacattaagcgataaaggaatcccaaacgcggcgcccttttcgttttttaatttgatggggaatgaccctccaattgtggctattggtattggcaaagatgaaactcgaaaaaatgatttgaaagatactgggtatcatatccaaatgacaaaggagtttgtcataaatattgtaaacgaaagtagtttagagcaagtgaacatgacatccattgattttcccccagaaattgacgaatccgatattgccgggctaaccaagataccctctataaaggtgaaaccaccaaggatcgcggagtcaccagctaaccttgaatgccgcctagcaagtaccgcagaaattggaaacacccgcatagtgttgggggaaattatctacctgcatgtaaagaaagaatttttggatccttacgagaatcaaacggtcctaccgatctaatctccccagttgggaggatgcacaaaaactgtgtatatacccgaactactgatttgtttaatgtaccgcgtctatcttttaaagaatggaaagagcaggaaaagagtagtaaaaatatatgaataggaataaccatggaatgtaccatgttaccctctatagccatagatcctccgagtaatattgatttttattctaacgatttgggacctcggcttgtaaagttcacgctaaaccaagatgatgcaatgtcgcatcatctttatttcggtgataaaacaagccgtctagggacaatacttacatttttccactggcaagaaatacctatggggtgccgaggcccctgtctgatctatctggcaaacaggtattattgcaccagggtcagcggatccaatattaccaaaagagcaagtaaattgtcttttacgactattgcaggtttatgttcccatgaaatattctcatattcatatctagtaaagaggatgtagtttatcagacaattttataattcgctagaatttcaatcaaattccagcaaccaatagtattgacttagtaacgaacaagtgaaaaacgcttgtaagtgaaatttgatactataataagtgaaaataattatttcctggtcgggatttaacgaatcaatataatttgcatccagacgagcgtatttcaactcacctggatgtaagcatcaagcctaaatgatgcatatcatgatgacacttcatgaatattaaatatttggatgacctttcattgggatgatactctagaaaaataatcaaattcattgaaagcaaatgaatgaaaaacttcagcttattaaaataagcatgaaaacacgtttaatcgtaccgagtaaagatattttgtatgtggtaaaccacatctcctacccagataatacgtaaatctcaaatgtcttacaggactaaatcaagattaatctccaaagtctaattaactattgttttaaataaaaaatgattatattaaaaaaataaattaattaacttggtctccaaatgcagttatgttagtggtcgccaatctaatatgcgaaacgacctcaaacaagttaaaagtatacttttcatttggctttaatatgaaagatggctgcgtaacatattcattgaatttgcccaaactatttccatctttgtcaaagaattcaccagtgatttcaatatcatgcacatcaaatgtattattattccttactgctccatccacttctaccataccttgtgcagtcttggaggtcaccagatcctctacaggcataaacacctttccagatttttgattactgttattctgattatcagcagtttcatttacctgtgctcttgcactatttttgaattcataaaaagggtctgcagatgaggcaaccatcaatagtgacaaaatgatagtaatttcctttaacatcattaattaatagatggtattccataataaattttcttattgaattatgttaaaccgtttgaatatctgaggaataaatacatctggagatggagaatacgggtaatagtaaaaattctctagataaaagaagggaattatttgtaccagtttggatgtttggtaattagaagttgtgaaaaaaaggaatatcaaatactttttcaaaagaaaaaccaattggaagatagcttgacaacaacaacttattctatatagaacgatcgtgctgaaagttttataatgttcattgtcgcaaatggattttataattgaatttctatatcggttgttctggttggagttacagtggatgcaaagggacgttttatccaaatgatttagatagcaaagattattttcatattattccaaattttttgattttgctgaggttgattcgacatattataatattccatcgaggtttgcggttagagattggaaagacaaaacactatctgatttcaagtttacattaaagtttccaaagattataccacatgaaaaaaaacctgagattgttttccaagccgttatccattttttttattgctttagagcctttgattgaaaaaatcttgttattactgattcagcttctaccctatctaactgtgaagaagaggtttgagtcattctctgtaatgactcaattttgatacccgatttagatatgcgattgagttagacattcctcctggtttgaagaagagatatttgattatctaaaagagcaaaacatgtcgctggtttggagtgttagagaggaatcaactacccatacaataataacattcgatcaaatttaagctagatttattgaggatggaagtataaatgaaaaagattttggcaaagttgtaaagggagaggatcgaacaacagaaatgatctaatatatgagaaaatttgagaggatacaaaatgctgaaaataatatccacgacgtgctaattgccttcaacaatcactttgcgggatttggtcctcagtccgtgaatgatttctcgaagactacgaacaaattggagagatattggaagtgacctagaaagtcggcaacaaaacaactcaaatcaagcccatggtagataccaatcaagtatatcagattttagcagatttcattttaaagcatagaatctggattaacattatgcattctaatatgcttggaataactgatgtgtatcattaagaatgtgtatgaggaaagtccgtgattattcactgatgtttttaccatccgatatcactaatgccatatagcacaaccggacccggccaactactcataaatgtaaagagaagaaaatatcgagcgatattattagtgtgaatctataataattatagcgtatttgatagatatttctttgctttctctaatacctttttttcattctcgggcaaaggctgattgtttattaattctttaaattgtagcgaatttatgattgcctttccaccaaagtgattattaaaataaacaaaaatcgtatcagtattttcctttattctattgatcttacttacccatggaataagttccttttcagaatacagataatcataccaataatgatctctagtagtgtttctcccatggaatctaactaccgccaatttattagatgtcaaattattttcatttgataaaaatccaagattctcttgcgcaggagaatcagtgaagacggatgcaatactaaagtgatggagtaattcaaacactccctccgtattccatgaattatgcctgaattctatggcgatattgttgtgatttttgagatcagattgatttctcagagcattcaaaaacttttccaatatattggactcattaatggtaaaactgggtggaagttgaattattatcgagcctaatttccctctactttcaagtggagatatttttttgaggaattcattcaaatcaggtaccacattcctgttgatatctaatctcttttcatgcgtaattatttcggggactttgactgatattttaaaatcgttaggagttgtatttgccattcctataaataaaccttcatgcatgtgttcatagaatctcttgtagaaagtagcatccatctcgacagcatcaaaaaattgagaataatatctcagttttctcgttttattatctgggtaaaatacatttaaccatccacccttttctggtgcaccgccatagttccatccagaacatcctagatataattgagaacacatgattagtttgattatgatttcccaataattaagaaaatcggttcattttcctctcatgctattggattaaaattatcagaaataatgattttgtttttaaagttttaatcacttcaatgtatactcctcattatgaagattggtatattaggatcaggagaggtaggtcgaagattggcggatggttgcttagatcttggccaccacgttatgattgggacacgtaatcctgcaaaagaagaaatacagaaatggataaacaaccccaaacataaagaaaatgcttttgttggatcatttgccgatgcagcttcttttggtgaattaattgtcatttcaactttctgggggggcactgagaatgcaattaatttggctatttcatccaattttaatgataaaatagtcgttgatacaacaaatccattagaatttgctaaggattcacccccaaaactctcactcgggtatgataaatctgctggtgaggtagttcaatccatgctaccaaattcaaaagttgtaaaagcctttaacatagtaggtaatccccatatgattcatcctgacttcccgggaggtccaccaactatgtttatttgcggcaattttaaggatgccaaagacacgatcattgaagaattattaaccccatttggttgggagacaatagacatcgggggaattgagcaatcgagattgttagaaccccttgccatgttatggataactcattaccttcaaaccgggttgggaaaccatgccttcaagttgttaaaaaaataataccctttatgcatttgtattttttttatgttggatgcctgtctacttgccattacatgaagtttcgtttattgataaattgtccagatagcagtaaatcacaaatattgaaacctcttccatggtatatatcgattttagttgctcgaaacttcaatcttgttatttataaacaaaataataaactaaaatctttccatttaaaaatgattatgattcgttttgttatccattggaagaatttatgcgtaacctatgcatgataacattactgatgttcaaaaggccatcaagatggtccaatcaaaatctgcgattaacgtcgtaggcgactagtctgttcaaatagcttttaatttacaaaatatgtgagtaacaatattaattcttgaatcccatctggtgtttcaccaaggttactactagtataatatatcctattaaatattgtcaacgaaaatattgacctacctttcctgtgataataatttgttgattttatctataaatttgttgatattctcaacatgagttccttcccagtaaacttttgaacattttgaacattcataaattgtggatatactctcatatactttctctggaacgggataagatgtcattgtcttgtcaagttttctaagagtgccgttacaaattgaacatcgggtatttgcgttcggaaccggattgatatgtttgatatcacatctccctaatataaaaaccaaattttcaacttcattgtcatcagggagtaacaatccattcctgctcaattttgagatctttaaatagagtcctctgtctctggttaccaatagcttgtgatcatgattacttttattgattagaaaatcatcactagcatctaaccagaattcggtgtcaaatcccattattcttaatttctttgcaatatttcctcccatgcagtcaataataaattttgggtgatccacttcatgatcagtaggtatctgttacttttagttattctaagtaccagtatgtttatctagataccaaccgttatagtggaaaaccattaatactatttcgcctttttatatgattgaccttttttcacttcaatgactctgaattttccctcttttcttgaatgattaagatgttgaaattggcgatctaatcaaatcattccctttgccatttttctccacactcactttaagttgcaactttcaactgagaatagatcgcagaatattttatttaatagttttatcaatgattaaagatttctagatgaaaaatcgaggttttagtaaattttagctatgaaagtaagattataagtgttgatgattaattattttagaatgtctgttgataatgatgttcgaaataatctggcaaagtatgagaaattcaagggtggagaacctgagaaagtaatgctatatcataaactcaaactagaaaacctggagataataagtgacaagacaaactatctggatatggacacagccaagattccaatagtagattttgtatgcgatatatgtaatcttccaatggaggcacaacaacacccatccaaagtagatctcgtctgcataaattgtaatcagacatatccttagtacttggactaatttttgatcatcgtattaactttgaaatatccagaactaattttaagcgggtcccgtacttagtttctgattactaatattgcaatgtctttgattttatattaaatgaaatcattctagagtggcaacatcgagtcaaaatctcgaggaaaaggtgtcatgaagcagtatcccattcattttaggacagggtttattatttcagaaggggaaataaaagaatacaagactgataaaggaaattagcaaacaaactggtagaggtcaatgaacctgataaaatatgttatcaattttatttcgaaaagtctaaggcaaaatgtattgtacatgaaacatgtatgatgcagaaatagtatttgctcaattcgagggggtgcctcaaatacagttcttccaaagattcgtgatatatctaggataacaagttttgaggtttttaggaccatcaacaacaagttacgtaaggcgatataaggcttgaatctgcaaccctccattctatatacgggttttaaccgtttaattcgatgatgtgtagatggccgattcacgaaagaataaatgtgtactctcaagcaaactattgagaaagattgcattagactcgccgaaagatctttttgaaaaacttttggctggcttgcttgatcaactcctagttctgttttaacctacttaaacccattcaaaatagatcaaacataatatttttatcaatcaattttctaaatgattaaagatgtgttatgtatttcgatatttctacaagtgatactgacattgcaaaattcgaaaagttaaaggacaattttagttggttttattcaaattatgatagaattgagagggatattcacaatcagtatattgctgttaaagatagaaagcatattgataacgatgtcaacctcgaagctcttataaaaagactcaatttgaagagctatgacgaatcaatagctatcgagttcgtaaattctaagagtcaataatatcgacaattgcttttttattcttgtccgcgttttaatatgactatttacaccatgattgattagaactcatagataatttgtgaactatggaatcaaaatgtagaatacattgcagataacttttaaaaatattttatatatttcgaattatcaatgtgtttagatggtaagatacgtaataaaagagggaaaaggacctatggaagtgaaggttggcaatgatagtaaatggatttgcatgtgtggattaagtcaaaaccagccgttttgtgatggtgctcataaaaaaacactaaatgaggaggatggaaaagtctacaagtacaatactgatggtactagaactgaaatacaaatttgaataagcaatgtaatcattcttataatttattctttttaaattgaagcaaaaaagttttaaatgatttcctttatgaaaaaagttttaaagttaattttcgctacgaaaataacatattcccgaaacatttatgagtgtgcatgaccttatcaattgccttttaatttagatattggaattatattaattgtcagaaagttgcgattaaaataggtagatggtaatatagttatgtacacactataatatacaatggaatccgattataagtttaggtatgtgaatgattacattaaaaatttactagatggaaatatgacacttcaatatgaagatgtggatttgaaaagtgtaaaaaaacctatcgaatatctcgacaagattgaaaaatggttggaatttagaaatagaattagagatgaggatccagatgaatttactaaacttacaggcgaattgtttacccatctcttagctatacgactggctggtgtagtaatagaccattcttgtgaatattgtgatatgactggtaacgaagaaatcgtagataccgaaccactatcaccttcgactacaattaaagaatcaaatagggacgccgaggtgtaaattttgatcaaaatcatttttcctgaaacaatcctgctaaattacaatacctccatgaagattcaataattaatataattatgcttatttgataaaaagacaatccattaggtctgttgatccattaccgagtcttaaaaaacaatggattttactttaataatttttattgagatacacaataggttcctctatgaatctattaatagaggcggctacgaaaagtttaaaaaaatcatataatccttactctggtttatctgtaggttgtgccttaaaaacatcttctggcaaaatctatgatggagttaatattgaaaattcagtttttggactgaccatgtgtgccgaaagggttgcagtgtttaaggccgtttctgaagggaacgtcgacatagaggaaatcgcattggtagcttctacaggaaaaccaatctatccctgcggtgcctgcagacaagtgttatatgaattcaatcctaatacaaaaatatattcaagtgatggtaaaactctaattttattggaaattctcccttttgcattttcgagggatgcgttaagttaaattcgctactttagttgatctcttcatcaaacttgatttcttgaattaaagggcagcctattgttatgtagaatagtttgaggatcttgtagtatcatttcattaaggttttccacatcaatatatacatcgtttgcatctttcttgaatgatcttgctcctgagtgttgcgtcgatggttacctcagttttatccttagtatctatactttctgtcttaaacactattactttttgaagaacattcctaactaaaatgtaataagcaaaaggaattattgtatgagttcctggtgctaatcgtttactacgtatccatccttaaaactaattccttatagtattggttgaataggataagaaaagaggaaataataatataatcctgctactaataatccgcaaattagtatttctatgctggcatttatcttaatcccataaatgtaattaaaacttccaaaaccaaaaccaaaaccatctggatacctgaaccttttttcggtgaatttgttcttgaaaaaacaattagcatttcttgaagtggggatagctatgtgaagcaaagtaaacttaaaatgttattatgaacaattgaaaatattttctagtgtacttttgattgatcgcatatatcttatcatctttattttacatggatctaaaggtcgttctgctaaaatacttttttttattttactaaggttcaatactgttactgcaagaataccaaatccttacatttcatatcttaattcttagtttcaaggagattttaataacccaaaggataagtaacgaaacatatatacttaattctagataacactgtttgcagaatgtctaatattggcaaaagtaaggtggcgcttgtaacaggtagttctaccggtattggatatgagacttgtttagcactagctcgcaacagtttcgttacttgtgctacaatgagggacaaaaaaaaatctaaggatttggagagaattgcaaggaacgaaaatctacaattaaagatatttgaaatggatgttgacatagaccgttctgtttatgaggcaattgaaaagataactacggaatttggtaaaatagatgtacttgtaaataatgctggatatggtctctttggggccttagaagacttttcaatggatgaaataaagaatcaatttgaaactaatgttttcggtgtgatcagagtaattcgtaaagtattacctataatgaggcaacaaaaagctggaattattattaatattagttccatatctgggcttgctggagatcctacccaatctgcatactgtgccacaaaatttgctgttgaggggttaagcgaagctctttcttttgagttagaatcctttggaataaaattaatattaatagaacctggtgtgataaatacagaattcgtagaagatttagtcgtaccttccaataagtatgggattgataagaatagggatttagtatccacatcatatgatggaaaaaagaaaaaatccttgtccatttacagcaacacagtggacaagttcttgtccttttattacaatgccatgagccatgcgcctcatccacaccttgtggctgacgaaataattcgagcaattgctaattcttccaacagtgagaatggagcaactttattgagaattgctgttggaaacgattccaaagaatattcaaaactcaaaaaggagttatctgataaagactttcacgaattattaaaaacgaacctattgaaataaaattacatgcgatgttctggcgattatataaagagataaactgtattcgttttatgcccgattttctaataattgaatttctcatgcaagaaaattctctcgacctgtcaaagaaataaaaaacaaattctgtctactattctattcttactcatatccatccaatataacactttcccattttgatatttctcagagcacatctcaaaattgcattccttaatacgatgtgttgaagtgaactattctccgatgactgctactccattataatgggcccgcaattgtcttaagcaataatgaagaaaaagttggatcatcattgatcaacttcaatattagtaaaataaatggagaccttaagacgaacagcatgaatgttgaaaagttgatgaaagatgctgcatgagtatttttagcccctgttcaccttgaaatttcaaagtgtctcattaatgtcctttgttttgtggcgagtggtcattttttaagcttagtaacggcactaacttgctttccaaagagtagaaacccatcgcaaatttaactatgcttattaaagctctcatcaatttatgatttataaatatcaaattacaacctagagatatgattatgccaatgtcaaatgacgatggtaatagtaataacaagaatagtttggtgattaaaccaacagagctaaagagaaaaatggataagggcgatgatatttttattttagatgtcagaagtaggcaggaacatgatatgtggactatttcttatgataattatccggattcacttgtaatccctgtagataccctggcttctctcgaatctctaagacagattccaaagaataaagaagttatcacgttttgtgctcatggtcaacgttcatctatggcagcaagaactctctcgtctttaggatataatgttagaactgttgaagggggtatggctggatggagtagattatatgatgttgctgaagtaaatttagattcaaatattactttgaaaatttggcaggttagacgcatatcaaaggggtgcatgagctatgttatcgcatccactaaagacaaaaaagcaacaattattgatgcaacatgcgatatcgacactgttatcaacactctccttcaagaaaatgaacttacagttagtagagtacttgatactcatatgcatgcagatcacctttcaggttcagtcagagttgctagaaaatatggatcagaggtagcgattagtgggtttgaaaactacactacagaacaggtatcgtctgaacaggacccaaaatgtaaactaatttcaacaggacaaaaatttgaattagaggatggattctatttagaagctattcacaccccagggcatacagatggtagcatgagtttcttattgaaaattcatagagttactaaaaatgattacaccaacaaacagcaaagtagtggcgttacttttgccaaaaatagtgacaatgatgaactagattattatctttttacaggtgatactatttttgtaaatggggtgggaagaccagatcttcgtaataaatcacaggaatataccaataaacttttccacacttattataacgtgatatttaacctacctgacaaaacaattatacttccagctcactatagctctggttttgaacatgaaaaacccgttcttgattcactgggatcgattaaacaaaaactggcatccatactggattccaaaaatacattcatagactttgtaacttcaaatatccctcaccatcctatgaattatgaaaaaatagtctacttaaacaaaaacttgacttcctgtgatatggtaaatcaaacagatctagagtctggtccaaattcttgttgtatcagagcttagtaatttatgcttctattttatagtaacgattatctggttctcaatattaactgttgtgggtttatcaaagttgatacagatcaattatgaatatttgccaatatcggaccttacttgctaaatgaccacctactacacccaagaagactctatgacaaccaaacagagtcattaaaagtatgtaaaatcttaagtgaaaggaatatgtattctatttgtgactacaaacgagcctttgagggagtcgttcaaaaattagctgaaacttttaacgatcctcaaattagacaaacgtcttattttgacttttatgatgattctcttgctatacatggttttcctcctaatttaccaaataacaaagagggttttaagcaatttatctatattctgtggaacgcgttccctgatataagaatcttatttgatgacattattattgaggaaagtaaagttgtttgccgatacgttttatctggaactcataaaggggaatttttgggtatacctccaaccaataagtcttttagagtaaatggtatgaccatcttttactttaaggatagaaaatgtgttcaacgttggaacctagtagatatgacatctttaatggaacagttaaaaccatagtcacacccacttgattcatgtcaaaccattaagaatagtcctgaaagggcaacagaaccttcatggtattgatcaattttataaaatttatcctgcaatttttaccaagcatagtgttagggctcggcctttcccattatttaatggcatactgtagggtcatacacaagtagaaacccctgattcacattctaatgtgacagtgttagacatacttttgcatcttaattacgacgattcttgaatggactttccctctatggcctgacgaaagttcataaataactgatttaaattttcttgataaaaaatactctaaaaatgaaacaattgtccttccatgcatatcggctgtaaaaattgttatcaattctggttttaggtcgataacgaactttaataattcatcgatccgatatgaacctgaatgcattctatcgcctttaaaatggtgactcaaaaccatgtactcttgagcctttgtttgatttgagccggtccctgccgaaactataactatttcattattcatctatgcatacatcatctattcatatatcttaaaataaatttgttcatatgaattactatcagtgtttgattgaggagtaccaattaagaatttaaaaatttgtgatttgactggtcgttttgctattcacataatctatctgtcctagcagacaatcaactatgtctacttactacctggatactagaacattcccattattttatccgtgtttatcatttttaatgcttccgcatatcatccaaacaaaaaaaggacaaatgaattgacatgcaattcattttaggattgaagtgccgaaagactgaatgtctatagtgctattactataagtaccaacaaaagaaatgaatattgctaataaaatgatcttatttactcgaattattttttgataacaaatcgttgcgtacaaacatagactaaattgttaaactattttatctttaaaattagggaagtaaatcctaatacgaaatattctaataatgaatagtgtcaataaagccacataatttaaatatactttaaatgatttccactattttgtaactaacatatattaacctaattccatgctttattaactatgttatctaaatttaattatctagggtgataatatgtcctttgactacctgcactatgtggcttcttataagaaaaatataaaaaatcaaaatagtaaaagtgataaacatatatcgctaccaaagagaacctctgcacgtacacttttatataatgataagaacctgacaaaggttcatccgaattctaaaataaagaaaaataagaaatatcgagtcttggtagccgaatcaaactctggtgtacgggcaatgatcaaattatatttagaatctttgaatttgaattacattgctgttgataggggagatgaagctttacatcttttttctaatactgttgacgacagagggaaaaaatatgatgttgtgttactggatactcatttagatggactatcaggattagaagtcgcaatcgagattcataaacagagtcccgatcaaagaataatgatcatgagtgcttcaccaagagaacacctttctaatgaattactaaaatcgaccaaaatacgtgagagcgatatttttgcgagaccatttagactcgcagaattgatttgttcaatagaaccaataccctgattccgaattatttatattagtatgtgagatgatttctcttacctatccatttagttttaggtttgattaatacccaaattccctacctgatgaggttttgatactatcggtatttttggagaattgatgtatatccatcattcataggtagagacaactatctgcttgcaccaattttagattttcatattatgaggccgacctaatgtagcctactgtagcctaacgtatatctttaaggaagaccttcctaatcaaactattaggccaatctgcgattagcataacgttgtccatctaatcctatttatagataactggattcagattggactatctgatcgtgtttattggatcggtcgatttttggatctgatttgaaatgattctatttcaacatgaactatcgtatcgttcagactaaaagaatcctgatgggcatgggcaatatgagaatcgaagaagaaatcatgggttcgcacattttgagtctatttacccatacaaatgactttgtttatgatttgtttcattgaaatcgggaaccctatccatgtccatcaattacgaggattatcaacgatctactgattttccaaatctgatgatctgatagatgcgaaaaatatttaataatctaattgatatgccttaaaatgttataagcaatgaactcacgaaaatctaagggagtttagaattgggtatgatattttcagatattgaaaaagcaggagatttggcagagcaagtagccttacaaattaagaattccaatggcaatctcagagctgtttattataagcttgaagaaattttgattaattataggaaaaataaagttgatgtggatttgattatgccggctatctatgaagttgattttgaatttaacaagacgaatcctgatggtagatctgtgtggattgcatatgcagatgcattacatgaagagttatgtaattcaaacggcagtcttcacaaaatggtgaaatatgggaacaatttaaaaggcgcattcctggtcaaccacataatggaccaactaaatttaccaccgagttcagctctgttgataagtccaaaagctgccagtatcttgggcctcggagtaactgcattttgcagacatgaaaataaaaaatgtgactgatcgccttcaatcattgatgcataagtcaatttcaatcaaatacaataatatggccatttatgtcaaaaacctttgagagcaaaattaattataaagtcatattacaaataaaacattgcggttagcagattatggtaaaaacgttgttatcttacccatattgctcatatcttcagtaattttgggaatcttatcctataattatttcactcaaacagcaaatcaaattcaagatctggcattagatgatttgcaaacaaattcagggattgaagtatacagcatttcaaacatccttcaaaactctatatattttgtaaattcaaatttggaaagaattgtcaattccccgtctattacaaactggaatattactggaattcaaagattacttgacctcgccctgaattctactaactatattacagatgggtattacctattagatagcaatgggaccttagttacctttaccgggataaataaagaacaatatgcaccttacaagggtatcaatctaggccatagagattattttaaaattccaaagcagaatggaaccgtttatacaagcactgtgattgaatctaacgacaatgtaccaagaatctatatttcgttccctattactaggagtaataatactgagttactcgatcctgctgtagacctacagcaatccagaaacaattctatctctttcaaaggggtagtagtggcttctatagctgcaaaaacccttgggagtttccttgaaagtcaattgcatcctaaatttaatggtgaaatagggtttcttgatagagacggtaccataatatattcacccaatcaaacctttataggcaaagattattttggaccggaatttcaatctttcatgaaaacctctcttaaggataacgaggagagatttaacaatattatacataaagctcttggtgctgaaagtggtgtagatgaattcaactttgagaattctacgaccacaatagcctaccaggcagtaatagttccaggcagccagggacaggagaatagaattggtaccttgttcataacggttccacatactctagcaggggatgtaataggtctaattaatacacaaaatctagttagttttgcgataatctttgcaattgcctcgatattagtcatagtaacaattatcttggtaagatggaaccgaattctaaagaatgtggtggatcaaaagacctcccaattaacagattcgattgaaaaattagaaaaagccaatgaaaacttgcaatcacatgacaagttacaaaaagagtttatcaacgttgctgcacatgaactacggactccgacccaggcaatatccggaaatttagaattagttgaaatgacatatcttccatcgatcctacaagaaacatcaataaatcaagaagaaatcactagagaatttgagaatttggtcgaagataaggaaaagttggccgagttcagaaaggcactaatctccacctataggaattcacaaagacttgagaaactggtgaatgacatactagatacttcgcgaattgaaggtaatagattagagttacataaagaatcatttaatctaaatgaaaaaatcgaaaatgtaattaaagatataagcaacaaatccgataactataaagagcaaaataatctacataatccgataacgatagactttgaacctcaacaggatccaattaacgtatttgctgataagataagaatttttgaggtcctttcaaatctgttaaataatgcaataaaattttcaaaaggtaaaccagtcactatttcagtcaggaagttaaagaataatagcgaaaatttttctagtaatgataaggaaaagggaaatattcaagatatcgatggtacagaaacaattatagtatctgttaccgatagagggatgggtattgacgtagaaattttgcctcgcctatttacaaaattcgctaccaagtcaaatcaaggcaccggactaggtttgtatatagccaaaaatataattgaagcgcacgggggacagatatgggctcaggataatgccgatggaataggtgtcaccttttcatttagtttaccgctagatcaataaccctatgaacgctacttagatttgcaacaacattttagtatgatgtttgcctctgacggctatttgacgggattatgagattttgtttatcaaaatatcatagtcaccaataattcagcggtatcaaaattgacttattttagggtaatgataggcgtttttcaaaaaggttactcgaagaagagattaaaggacgggaattctatatcaaaggtttatcccactcgggacacatccagcttttctttgtgaagtcatcattatatagtcgttatcatgttctacagcgggatgtaatgttatgtccatattctgacttcctagagccctcaaatgtaatattaaaaagagtagcagtttgtataaataattcggttgggtcgaatcgctaattgtaataaaaaccaagatatatagtaacagatatgaaaaaagatgaaccaattcttattagtcatagtcaattattttgaaatggcactttgcaatattgaatgaaaaacaattcctagggccctatcatgatataaaaaatatagtcgagattgattttaacgaagcacaatggtttgatatcttaagggagcattttatgaaaatatcttggaagttatcaaattttcgaaataactgataataatgctatctcatcaaaaaattcaaaaaatatatttattcgctgtgaataattcctttaatcttctgtttcatttcatcagttatatcttcttctttcatattgtgatgacttttggcatgctctatgccatttttcaaaacttcctcatctgtttcaccttttacgatataatcacaatcaaatccagcttctctacaacttatcgttttcataattatccttggacttgctacctataaataattattgtaccatatccgggtttatattagttcaaaactattgtagttcaaacctgtttcacaataaagctagctgtattttgactaatatttatctaatatgtatcattatgtataaatggtcctaaatcaaaataattaatttcgagttggtttcgatcgcactgtgaaagttgccgatgactcaaatgactcttttaatcaccttctctacaatttataaaaataaggtgtttgtgcttgcctaaatatcgatattattgtagagttagattcacttgaggaacactagttttgaccaatgggtttgcttggaattgtggtagttcggtgaatcccaatggttttagtcctatcagtcctttattattgaaaataacgtttgggaagattttcaggaaagtgttataatctctaacgccgtcattataacaggttcttgcaaccgttattctattctcggttcctgctaattcgtccatcaatctagtcacgacctgatctgatttcaaagaaggatatgcctcataagttaatacaatcctaccaagagcactctcaatcaaattgcttagctgagttttttgagaaatatcactgttcggagtggacatccattgtgttctcaagttagttatttcattgagagtttgttgctcaaattgcatatatccctttacagattgaaccaagtttggaattaagtcataacgtctttgcaattgcgtatcagtatctactgccaacctctacattctcattttttgccaaggctgcgttaaatccagaataataggtaacaatgaatataacaatgatgatcgcaatagttatgattatgcctaaggatgccgctatactcttgcttaccagactattttcctctgttgtctaaattgacatgactgtgctataaataaacattatcgtcctccaccgcccccactggagtgtcctccaccgccaccactgcctccaccgctaaatccacccgcttccacttccgcttctaccaatccacccacttccactacttccgccgtaccaacctgctcctccgtaacttccccatcttctcccgtttcgtccgcctcttctaagggatagtagtaagacgctcaaaataattattacaatgattataattccaaagtactctactcgagactgttgctgaagttcttttgtcaattcatagttcgggtcatcgttagaatatccaatgtattgtcccaatgaaactactgtgtttagaagcccctgatcgagtacagtaatatttccatttttagcataaagatcttttgcaggcaccaggtaggtgtctagtatttctccagcaattccatccgtgatattaccttcgagtcctctaccaacctcaatccgcattgaacccccggatgtgtcaggtttagaggaaaataacaataaaatcccattgtccttcccgcccttgccaattccctttattccgtcaagatttaattcattaaatatgtaatttgaaagaggactaaagctaccttttttctcctgagtcggattcactactgttattgcctcaacagtataatcaactgtatttttatctttttatttattgactccgctactgtatcaaatgaatcttatgttttgactaattagaaatctcttaaatacaagggaataatcttttatccgcatttcatgagaaaagtaatctctttttttaaaaagttaatacgtcgtttttgatgatcggctcttaatcaattagattattaaccacttgaaattgacattcactattacagtcatttatgattcgatgattccatctgtaataaaaccttgtccactacttttttgtttctttctaaataactaggagattctatatctatccaatctgttccactaaaaaacacatcgtaacaatagatactattattatcactaattcttatttttgatagaatatctgaagatagatcaaaactttttccatcgttctcatttgattttattcttaaaaaattcattattctattgttgaaaagataaattcctgatgcttcggggtgttcaagcttgacaattggtttttcactgaattccttaattaggtacatatttttgttaaatttcttgtccaggatcaacctgcctgtttcctccttacgatgtgacctggctattactattcctatcagtccttcatctgtttcagaattgattttggtatattcctcaacaagactgtttatgtccacagcacacaagttgtccgcataccataccatgaagaaggtctccttctccaatcttttcatacactccaggagcgcaccaccagttcccttttttctatcttcaataaaaataattttcttgtcgataacgcgttccttgccctctagataattaataatttgttttccgtgagagtcaaattcacaaactattatgatttccgtaatatgtgagaatttggaaacatatcttattatgtagtcaatcaagggctttccattaatcggaatcaacgcctttggactataatcactaaatggtcttgctctagagcctatgccacctgccagtaatactatcttcatccaatctaattttgctcatgaatttataaaatagtatctgaaaaaatgctaaaagagaaataaatgcaccaatcttactgctatccatgataaatctaatctattataaatgatctgtatccttttcgattctttaggctcaattaagtcatttggctatttgaagggccatgaataatatgttacgactatgccagtctcaaaagaatattctcatagtcaaaaaaattcgtattaggtttaataactttatttcatattgttaattcatgctagaaaaacaaatcaatgaaatgaaagagaatatagatataggaatagaagtagaaaacaggaaagaagttgtaggtattcttaatatcttgttagcagacgaatacctgctatttacaaaaacacgtaattaccactggaatgtagtaggcaaagatttcaaagagcgtcatgaattttttcagcaacaatatgaaaaattagatgggatgattgacgaaatagctgaacgaaccagacaattgggtggagccacagtagctacaatgaatgagtttatgcgtattaccaatttgaaggaaaaacctggtgaatatccatctgatttaaaaatgatatcaaatttattaaccgatcatgaaagcaccataaaatatctacgaaaaagtgccgataagtgcgatgagaaatataatgacatggggactaatgattttttgataggcttgatggaaattcatgaaaaaatggcctggatgttaagaacccatttagactagatggatataataaggccatatctataaaaaattaaaagatatcttgtctatttttttattaattttatcccatgactgatcaaaagacaccataaagaaatattataggaccatatttctagagacaatacataatcatataaaaatggtttcaataattggagatctaaatttaaattggtagggaataacattatccatataatttattggatttgatattaacattgttactaccaatttctaccaagtaagatattagtacaatagataaaatgctcattctagacaagtatactattttcttgaaaacaacaatgattgagatctttatataggtaaaataaaaattgtaactagaaccctttgattttcacactgcaggggcttattctaggtgtgatttctattcatgaatacggttacagatcttctaactgatctatagggtaatcctttattatttatacctaaattctccttattaattggaagaataataatagcatttgaatgatcgattttcctttaaagtccaaaactcgttccttttgatctaaatggtcggttgaggaaagaaggtggttaaagttatgaatataatagatatccctttcatagtggaagcaaaaactatgagtaatctaaaaacaaaaaatgtttcatattattttagtgaatagactcatagtctttgtctagttaaaaaaactataatgctgggccaagtaaactcttacgagagacttttggatatatctaaagatcaaagagacatgcggttattgaaaaagaaatttcaaaattaaagattgccatcgaattgatgaaaagtcaagtattcttttgatcattggattatgttgatatgatacagattttaacctccatatatattaaatcaaaatattatgcccgcgatttctgaaaaaactcaatcccaagatggttagaatgatgcgatttacttttctgtgtatatgttcaattcttgctatttgatgattaaataggtgatatcaaatcttttcaaagatcaataccagtcattgatctgaaaaccagacagacaaattaaaataacgtagatgggtaaatcccatggtaagtacaacatggatacaaaatggaagattattaatggtgtggccgtagcaattttcatagcagccgctttttattggattgcaaattcttaagtttcagaatgacatattcataaattatctatattgctcttgtttatctcataaggtggagaattattaaagtaataaacattctcttgttccgattttcaattttaaacgcccaacttttgcagtcttgaatttagaatactagcctcttatttattatgtcctatgttctctaactacctccaaatcccaagaatgtttatggaagtgtaatcttagatcacaggaaaagtcatccagtcgataggtggctcgttaaatcaacaagaacatttcaaacataatgctctcaaaaattcaatttactattcctatatttcataaatttgattcacatccaaggaatggtttgaaaaacaaaaataaatttggagtcgagtacgatcgtttgtaatttaagagactacttagctatctgattacatgagaaatattccataccctgccccacgatacatcctgaaatgaatccttcgtaatatgctctatcattaggtccacattgattaaatacagtttggttgtatggtttactttggtctccatcattaaagcctgacctatagcatgcctcattcaatggatctctgttattttcatcatcgtcatcgtcactactggattatgtaaccataggatcggtaacacccatagttccgattacgcctaggattgctatgatcgtgtaaatccttaacactagttagtgtcctctcccattgtcttctgaacgtttgacaattacaattaaatttgtcatcatggtcctattacgaatatctagttaggcttttctatctgataaggtctgaatgcgtcgttagtttcaaataaatcccaaattattcaatcaattcattaccttttatggacctgtcccatccttgattgatacaatatgtgataatggtcctcgaaagaagagatttataaaattctaaattcaatactgtgacttctattctaaaccataggtccccaattgttcaattcatagaatcaatatagtaaggcatatcctactagatattcatgcttgattccccatttattaagggacacaaaatcaacaacatatatggtaatccttcgttacatctacatcattttaaaacccagtatgtaattggttgcgaggtattatgattgagcattaaaagtgggtttgaatagagtcaaaatcattacactcttagcggtataagaatgggtaagtcaaaatttaataattagaaaagtaactaagaattgatgcaatcttctaattcggatatcattaatagaaaggtggtaatgatttgtgaagacgaaaaggaattacttgacctttactccagggtgttggaattgaaatatgacgttatcaaagtttgttcaggagccgaatgtatgcatgaataccttgagaaaaaagcaaagggatctccaattgatctccttttcctagattacaaattaggtgatatgctaggcgatgatgtagcgaaaaagataaagaaaatgaatgggattaaaattattctgatttccgcatataatttggatgaaccaactaaaaaagaactttttgaaaataagtatatcgaaaaatttctgcaaaaaccgattcgaatgagacaaataattcaggtagcgggggaagcaatctgaaataatttaaaaaaatctattttctatatatttacttattggtatattaatttaagactttgaacatttggagtttttttaacattagatacccctttgggataatagagattccaaaatggcatcaacctgttttaggctaagatttatgacgatattgtggatataatgtattacatcataattcaatgggctgatcttttgctttcatttagccgtttccttactagttgttttgtgatatctaacactttatctcacacaatgaaagcaaaaatgaccaaaaatctgatgacttatctataaagttcattcttatcatcattacccatctctaattatggatgatatatgggattgggaaagacgatattgttttgagcttgggtaactccgcagctatgggtctggatatttgtctttaatagtagaatgttctggaaaaccatcagaagcacttgcggtattggtatattccattcgatttctggcttaattgagaagacccgttctcaatactaattgaagggtcacatagatgattttatttaggaaaggttgtgtggcattttacaggaatggtgaagattatttgatggttaataaccgggattatcaacaaaaacaacactttaaactattttgagtgtaatgtaaagataagttaatgaaaggaaaaacggtatgagaagatgttccattttcatacagtaccattcaattttttgttcttacaaaaagtataatttgataaagattggttagattgcctgctaaagatatccaatgacaaaaagagccatagcagctgccatagcagcaccccataccaatttattccaatcaaaaatcttttgtccatctaagactcccatcggtatgagattaaacatcgcaatccaaccgttaaaagaggcaccgactgcaaagtagggattataggaaccgtaagtcaaagttaaaatcaaaaacgaaaaacccatagctaaattagtaagcggtccaacaagagcaactctgccaaatttagagcgatcatttagtctgaccatcactgctccgggagctatgaacttgaatggcattattgggagagcagaaattgccgtcagaacaagaccatagatttcggctctaaattctgcccagctaccataatattgggccaagaacttatgagctaattcatggactagaaaagcactggtaaaaattgcaaggaattgccaagagaaatatctgtaattattcagggaaagtcctacacaaattacgagcgcagtagctaatgaaagatgaagaagttcggtctttgaagtttttatactcaataaattacctatcgattcttaaacccggatgagttgatttcttatactgtttgtcgttaaagagcgtatcttgctttcgcttattgtatgaatacaagaaaggacatgaatgatgtattggatttctatgattactgcaaaagtattctttacaataattacatctaaagggaaaaccatccaacagtccgcaggtatagcactgaataggattttctttcctttctgtagtcatattgaataattactggattctaatgtgcatgaaatagtaatcaaacatccagtgatagccactggtaaccccccactatgattaagacatgatggaaaatctagttttttcccacccagataattgaacctcacaatcctcatatactatattaataagttcaattatatcaaattaccttaaaaattccactcagatttgttttggataacatattgattaatgccatttgaccaaattgatttttttattattgttcgcagataaatggaattcacgaagcattaatttttgagtttttgataatgataaaatttcaaaatagtagtagtatttgatacttgtgaggacgtaaagttcaatttcaacaaagcagcataaatctaatatttcatggctttattctggaaattatttttgaaaatgaaattaagtcaaatataccctgttttaaaacattgagatgatacagaaattaatatatctacatctagtaaaccagttgttattagggcaaactacttagatacctaaatcatggactattgaaattcggaataggaagatttacatcttattactgagaaaacggcggagacatgttatgagtatttatggcaacttctgctgtattatttgaagagctagtttcattgattatagtcattggtaaatcaggagttggactttgtgcttgcatacttggaattatgggtattgcaaaaagaatcgaagatgcaaagagtgcagaaatcaagaatacacatgatttattcatttcccttacatttatatcaaagtatttaacatctattaaaaatattaacttaaagtaatatttgaaattactattgtgatatgagaattagacgatacaatcttttgaaagcccactacatttatgcttaatttcattcatcagatgccaaacgaactttccataatgtttaccaaacatcataggaattggtcaaatgatatattggaaaaaataataaagatttcgggggtaaagtcactccaacaacctgtactttttaagaaatatcatcaaatacccgcactcgatgcttcgaattcgtaaaatgagataaatttgttggatcataaaacaataacatattgttcgcaatccaaataattcaggtaggacgattgggatcacttgaataacactgtttaaaattagatgcggaaccctatccaatatagttaagaacctactaaaagtctaacctatagaatcaaatttagacagtgatttccacaaataccacgtagcgatacttctataaggtttccatccagaagatacttccagcatatattcatgagtaggtagttcagctaaattatataatttttggattgccttttttactcccaaatcatccaagggaattacatcttctcgctgcaggcaaaagataagaaacatctccgcagtccatctcccaataccttttacttttaccaattcagttataacttcttcattttgcaaatcgggtaaaccatgaatatttaattcaccggagacgatcttcgtcgacaaatttttaatgtattctattttcttgaatgacaaacctatagtaaatctcaagacagtgtttggagtagaaataatctgttcaggagttggtaaagtatcaccataataccgtagaaatctggagtatatcgcatttgcagcactgcctgcaagctgctgatagattatggatttcaacaaagattcaaagagattaccgtggatctgaattgaataatttcctatagatttaattaatttcccaagtagaaggtcttgttttgaaagtaattctaatggatccggattcgtcattcctacactagaaatacttttgatcaagttttaagagttactttatccaacttactttcgttaattcaagataaaccagatcttagtctctgcatagtaattactgagaactaaattttattgtataacattgtctggttagaatccttactaagatcttctgtttcaagaccgtaattaatactaggatcttaaatgtcagagcataggagagatttatacttaaaatgggtgggaatgagggagtaaatattgaatatatttttatattcctaaactctgaaacaaatgacaaatacttaacagatcaattgaaatcgagaagaaaaaaacatcgtcagatcccttcaaattaaatcatctcaaaaaattttgctgccattgttactttttatgattctgaataataggattgttgtttatgtacgaccatcaggatattaaaagacatgagcatcatcaaaaggtccacactgattacagaaactgttcatttcattcgacccttcttctgataacgttagaaatacaacttttttctattctatactttttactttatttcagtaagaaaaagtttgcttaggttcctgtgatgataacactataagaaaatggtaaccattcaatcaaaggagaataattgcttctcattgtggatgaattttatcttatttacacatctatgataaaagctctacaagcgcgtggaggatatttgtatggtattaggaaaataagttatactaatgccccatctcatgttatatttattggtgaattgtatcccactctagaaaaagacattcctgctgacattgattcaacaaataatacagttcaaaattatctattccatgataaatcaaaaatatgaacaaaagattacatcgatgatctctgactgcgtatatctgaaggacaggatacaaataacaaagaagcaaggcaattctgattctgtggcatactgcggactaaattaaataagtgagtagtttgacaagtctacgaatacacttgcatcaaatactaattccactacgttgtgtaatggtaacgtaaaaaaactacattgttttgccatattaccaacctctgcagtccatattccattttcttccgatactgaaagtgctgtactaatatccatgaaggggaggaagatccgcatatcatgggagttagtcaaatgccaataaatgatcagtaaattatcttcgagtccatttggggtaaccgaattcagattaaaggtcaatgctttcccaatttaaattcaatgttccattacggtaggttattctaatttctaattaactcggtgcgctcccacttgcatgtgagtcattggatacgattttgataaattgcaaattcttaataacaatattgataatagtgttctatgacatataacaaatttttttcaattttatttatctcgatgatggcgacaatttttgccggcattttaacaattccaggtgtaaatatgcttacttacgcaacatcattgctaggggaatcaatccaacagagccaacaagatcttcaatcgaccataaataaccaagtccaacaatcgattacagataccatcaacaccataaacgatagcaatgattcaactgttgacaccatcgcaagcaatcaaacacaaaatacgggttcctcaaataacttgataaagggaggaattacgagcttgcagaacgatcaatcggataataccaccacttggatattgggcggtgtatataagatggaaaatcttagttccgaagctccaacatttaatgcatcattctatatggtaaaaacagatggtaattcttctcattctcatgacatctatgacttggttttgatcactcctataattgatagtacaacaagtaattcaacacacattaatggtacgacaactgtgaccatgaaagacggacccataactaatgtacctacaaatattaccatactaggtgacagtgctattagtatttggataaacccatctaaagtcaataatcattttggagattcgcccgtttatggaactcaggaattgaaatgtgtggataaacctgcactctgtaaatgagttgaaggcggttaaaatgccgcaactcgacaatatattgtacaagactacattaagagaaccttaagactattggatatctatacacagatcgagatttagggataactgtaaaatctagtagaaactatcctttttggcttattttttcataatggaagaaatatagtcaaactatgtgttgaaatcaagaaataatatgattgcaacgtagcaaattctatttatttcgcacatccttgatttcttttcgaaacaaagatggctaaaatagtagttttgatcattttaattactgcctgctgagcatgagaatacgtgatagcatacaaattacattttgataggatgatagtaatcttccaatacattaaatactaaattgactattgtatatcgatttgaattggattatcctgattatgttaacgatttagaaacaatcaataatcaaaatctgtcatgggtttacctggaaagacccacacgagaaaaaatggatttagtatccaaaaattttcctattcatgagttgaatatcgaagattgcttgtcgaagaatcaactccctaaaatcgatcgatatgacgatcatatatttgtcatactccaatttccaactactctcaaaggaagagctgccccaaactttactcaactctccttgtttataggtaaggactatctaatttcgattactcagggcgatctttatccattaactgaactatttagaacttgtaagagcggcagtcagaagatcaggaataatttcatgggaggatctccaggttatctattacattcaattttagatgcactggttgataatctacttcacatattaatgaaaattattggaaacttagacgacattgaagatgaagtatttgatgataaagtggcaaatgctaaggaaatatcaatcctcaggagagaaattacaacacttcgcagaatagtcttgccgttaaaacgaatcatgatggaaatcacatccagagatgttaagagattttcaagcagcgcagcggcagaggatctaattgattattttgacgacattaatgatcatatatcaaaagtactagaggcactcgatgaatccaaagaaacaattgaaatttacaaagatactgataatatgctgaattcggaaaaaacgaataaaattctaagttttttaacaatattgtttacactctcaattccaattactgtagcggggaccttttatggaatgaacattgtaatacctggtagtgtcaatgagggggggaaaattatcgattactttccactcattttgaccgcatcactttcgtcactggctgcaggagttatggtgttatactttagaaagttaggctggttcaattcataggatcatattaggatatttccatttctttaccatctgtatttaattcaaccaaatcatatcatttcactgaatctttagggtagaggtgggggcagaccaatacttgtcctttctgcttccacctttgcttaattacaaccaataatctcattattttaattcatcccttttgtatttacgattataagaatggagcatatatgtccattcagtgtcagaaaactaagtgcgactagtatgaccgtattttagtggtagtataaaattacatttgatgaatttcgagatccgctcgacaaagtgggaaagcctatatgacctagtggcaaggattctaccatgtctatgtcttgtcttggctgtgaagaatattttgataggtatatatcctagatggtgatgtaaacgataccagtatgtgcatcgtccgattaaaattgatttcacaagctcctgctattggtatctttcaatattgggcaatccttgtttgtaataaattgtaaagttttgaccttgagaataaggacaattttctactgacctaggtataccgtccgaagcctcaactatgcaagtaccattttgttttatcttgaccactactagctcttgaatgcttggactaaaaagctgttgcaaggatccacccattaagataaaaattaaaactattcctgcaattatgaataaaaaagctaacatttttggtgaaagatcaaaatccattttcttatttcaatatattagaattctgccttgttatattactatgttttcattttttattgaaatctgaccggataatacaaattagccttgatatctttttgtggttttgacatcggtatcatttatttgactattcttttagtcccatgatgattgcaatatgaagtcaggaagtctacatttatgctagttattaatggtggaaacagtagataatttagatcaagattaatttttggcaacttatcaattctttatgtgtaaccatagaatgttcatatgattcaagacgcttgatgaattgaagaaggctaagcaatgggataccaattgagtagtttgacaaatttgtaacatttcacgtctctcataatgattattagcaagctaattagccggtacgcatcagaagatgcttttcttcttgcatgggattggtattacatatcgccacctaagattagattatctgtcagggatcttcaactaaaacccttcttaaaaaacccgcttcaactagatacctatattacagatatttgtagagaactggactgatatctttttgattttgagtcgtgatactcaaattagtgtagtcatagtttatgaccgcgttctggctgatacaatatcgtagtgattttcatcagttaggaacttgtgctacttattttctaagatgtcttaaaattcctcgagtataatgtttagttgatgcaataaaaacattgcgattgatagaacaataatttattttaatgagaacatctataatctgcataaaataattaggttcatagtcttgtacatagaattgagattatttcaactaaggatcaaagtttcaatttatgaatgaaaagaattctcaaaaagatgcatggtttgtactagcaattctcagctgtctagcactaataactatgtacggagagaccatgctgattccagcgatcccttatttaataaatgattttgaaatatcttataatacctcatcatggattttgactgcctacttggttgctggtgcattaatgactccgattataggtaaactttcggatgtttatggaaaaaaaaagatattggtgattgtaatggtgatatattcaatcgggagtttattgggaggaatgtctgatgatatctttatgatggtaatatctagaataatccaaggaactggcctagctatgtttcccgttgcctttgcaattattagagagaaattttccaatgaaaagcttgcggtaggtcaaggaatttttactgcagttttctcagcaggtgccgtaatcggtcttggattaggggcaaccattgttgaatattttagttggcatatgacattcctctcaatagttcctttaatggtaatattattagttgtagtactaaagtgggttcgaattgactcggaaaaactcgtttcaagaattcgaggtagcatagatataagcgggactctggtgttggtatgtttagtttcaactttcctcgtgggtttgactatattaccaaatactatttctaatccaaacaacaatcaattaattctaactttagctcttttgataatctccattgtcctcataccgatattcattttcacacagagaagggctcaataccctattatggatcttaatctgatgaaagaccctgttcttttacctgttaatatattaataatgaccattggtattgcctttttcataatttaccaaactttgccaattttgatacaaagtcctattcccctcggattcggtggtggtccggtagccattgcaaatgttcagcttccattcatgattttgtcatttgtaatttcagttttatcaggatttttaatatctaaaataggtaacataaagccaactttgatgggaagtatttcaagtacttttggcttcttgctgctatttatttaccatccatccgaactcgtgatatcgctagaactctgtgttatcgcaataggattagcactcgtagaaataggtgcttttaatatatcattggtatctgcacctttaaaccagagtggtacagcattaggaataactatgttgttatttttgattggaatgtcattaggtccggccatttctggtatctatttagagagctttagatctacgattgacaatacccatgagtcatatccaaccccagtcgcttacgattcgatctttttaattgccttattaatatcaatcttgtctgtaatacttacgctattaataacaaaaaaactagtaagtaaggtaatctagtttgctagatcaaacttgcttgattcaactatttgtgattgaatatacttgaataatgatagtcctatttttcacttgtagtgacaatttgtttaatgaaacaaaaagttaagtatttaaatagacatttgaatttcgatatttttactatcctaaaatacaaattgaagaataccacggaaatgctttaagtaatctgataggggcttttatgaattagaaatcaatggttctaaatgtaaggtttcatttaattagataaaacgtatataaattccccataagaattagaaattacctcttgaaaagagaactcgatgacatttttaaagcatatattgtacaactagttcttgataaaaaaacagaacaggccctagaaaaattaagtcaattttatgagattaggccacccgaaatcggggtaggtacaatcaaagggaagagaagaaccgtgtacgcagtttatgttcaacgacaatgtaaaatttattgtataaattcagaaattttttacaatccattcataataatgcatgagttctaccatcatttgcgtaccacagcaggagttcataagggatcggaaaaacatgctaatatgtacgctagaggctttattgattcatataaaactattattaataatatggggcagaaagataaaggtccatagctaaattttatgtccgtttgaaaaattaatttaagagttgtcaatcaaacctatcttacgtgagtaaattttttgtcctttttttgttaacctgaaaatcattactgtacttttttcaggattagtagagtttcggctcatttgatcttttcaataactcaaaaactggaaatagttgttaaggccagtgaaactgactttacctttcatatattatatattatttccttgaagcacctattttttgaggctcatcaaatcttgtagttgactttatttctttccttgaattattttaatataataatttttcaattaccattgttttcataacttatttattacttttctggcataccgactactagaaatagaaaccttgttgatcgattgcttttagtcattatacattatgtttatcccattgtgtcatcttgtgatttattgtctataaatgctcagtctcgattggtaatatctaaataatgcaataatcttcgaaatctacttgcttttggtaagccagtattgtatttataagatggacattagtatacctaattatagtaactatcgagaattatgttttcagttggtaggggatatcatttccgcaaatatatgatccgagtttaattcctttgaccaatgcatctcctgcatcaatattgaagaatacatgattgattgctgatgaatttggtttaagtatgatgactattgttagactcatataaatgggacaatatttagtaaaaccattaggttcctgcaatatccttaatttgttacaatagtcgtttctgatgatcgagtttagatgattcggtaccctggaaataaagtcattgttttcataaggaaccatctatgatccaatgttttaacaagctgaaaaatcaatgtaaagttttgataaatacgatttgatgatcccgcaaaaatgattctacttaatctattcatttagtatgagtagatgataggagacattcttgatcttaggtaaaattatgcataagactagtaggaagaaaacagcttgtttttttgatataatttgatatcccctttgcgaattgatatgcgctaatcattccctttttttataataatattcgattacctgctaccgttaaatcatacaattggtaaatgacccttcgtcttgggtaattaatgcctgatcattatactgaaatcgtagaagattgcagggatattagaattataatttgcttaaagttatcagatgagttttctgttatcgtatccttcttactataaaaaatattgtacatttttttaagtaatcagttatcaaactcctttattatataatgctattacttcttgaatgataaagatgttatcattaagtatgctactaatattaacggtcctgattataaccggaccaactgcacaaatggttttctatcaatgcgttactgctcaaagatcaaatagttacgaaagtagtacctcaaattttgatataaatagcatatttaataaccttcaaaacaaatttctaaatccaattgatgaattgaattccgacaatgctgaagttcaaagatcaaatagttacgaaagtagtacctcaaattttgatataaatagcatatttaataaccttcaaaacagttttaccgatccactgggacaagttgacataacttttcctcctggacctactgactctacggttcctgtaaatcaaccaagctccactgactctacggttcctgtaaatcaaccaagctccactgactctacggttcctgtaaatcaaccaagctccactgactctatggttcctgtaaatcaaccaagctccactgactctatggttcctgtaaatcaaccaagctccactgactctatggttcctgtaaatcaaccaagctccactgactctacggttcctgtaaatcaaccaagctccactgactctatggttcctgtaaatcaaccaagctccactgactctatggttcctgtaaatcaaccaagctccactgactctacggttcctgtaaatcaaccaagctccactgagaaaccatccacctctgaagaatcaagctccactgactctacggttcctgtaaatcaaccaagctccactgactctatggttcctgtaaatcaaccaagctccactgactctacggttcctgtaaatcaaccaagctccactgacaaaccctccacctctgaagaatcaagctccactgactccactgactccatagcacctcagagcgataaatccaaggacgaatcaagctccactgactccatagcacctaaaagcgataaatccaaggacgaatcaagctccactgactccatagcacctaaaagcgataaatccaaggacgaatcaagctccactgactccatagcacctaaaagcgataaatccaaggacgaatcaagctccactgactccatagcacctaagagcgataaatccaaggacgaatcaagctccactgactccatagcacctaagagcgataaatccaaggacgaatcaagctccactgactctactgagaaaccctccacctctgaagaatcaagctccactgactccactgactccactgactccatagcacctaagagcgataaatccaaggacgaatcaagctccactgactccatagcacctcagagcgataaatccaaggacgaatcaagctccactgactctactgagaaaccctccacctctgaagaatcaagctccactgactccactgactccatagcacctcagagcgataaatccaaggacgaatcaagctccactgactctactgagaaaccctccacctctgaagaatcaagctccactgactccactgactccatagcacctaagagcgataaatccaaggacgaatcaagctccactgactccatagcacctcagagcgataaatccaaggacgaatcaagctccactgactctactgagaaaccctccacctctgaagaatcaagctccactgactccactgactccatagtacctaagagcgataaatccaaggacgaatcaagctccactgacaaagtcccaaatgcagccattgaaaaaccggtaggaattacgaaggtgatatctccaaccaatacaaatcctacaattgaaagctaatcctgaaatcagcgggtcatgatgtttcagagctaaaaatttttttatcttacacatatcggttgacatttaacaaaaagaaatccgaaagattagattatgtgcaacctttttaaggattgaacaattaatacaaactgctgacacccaaattatcaaagcagtaaacttatatcgaatcatagtcacattttttgagagtcttatccagttaagcctgcccaatattccattttagttcactgccaaacttgagccttttaaataaaaattgacatggcaaagattgaccggaatttagatatctttttttggtaaattaagttagatgaagtcctattatccgagtacagcaatcttataaaataggttcaagattggtgtttaataaagaccgtcaagtttagagggtatgtctaaaaatgatcagcagatccagtgtgagcatattaatcaagccgatttagaaaagccagggaatacacagggttgtgaagaatgtgaaaaaaccggttcagaatgggtacatttgagactttgtctaacatgtggtcatgtcggatgctgcgatgcttcgagaaataaacacggaacaaagcattttaaggatactatgcaccctgtaatcaaatcatttgaaccaggagaatcatggaagtggtgttttgtggatgatatatttgcagaatgaggttttagatacgatgtagaaggagtttatcgaattgaatcacttgctccaaatctaacaatgtcatccgattgataactttttataactggtaagcttcctccgtcaaccaagctttaacgacaagtttatttttagataaaggataaaccgttttgatttagttatctacaataggcatttggggatgacatttcagcgagaattatgtaagtattgataaactatgaataccttactaataatatctttaaacaaataaagaatagaattctcaaggcctcaaaataaaaaaatctttatgattagttaggtcataatgctttttgtatcttaaattactagatatggaaattatccaacaataaaattctccacaactcagttaaggtgataatttcatatttctctcagactaacgcaaacacactatttagaattattgcagcttgtaatttaaccatattctatcctctttaactataccttagcataatgcttgtatcgcttttctattcctctattactccgggtttcgatctatatctacgacttattcagttctgccggttccataatacttctaatctggttctgatgatttagattcatttggagacttgggctcagaatctacatcattttttctttcagccaattttaatcctaattttatcaaatatggcgctaagaaggtagaaatcagggttatagtaccaataataggtaatataaaagaactcaccactccaatgtctatccctcccttcgctacaattagcgacatctctccacctcttgaagccgatagatcgataccggtctgcatggcagtgagtttgctaaatccttgatatcttgaagttaagaaaacaatagcaaattttacgactgaggtaacacccacaagtattagtgcgggaattatgaatactggtatcaaattgatatccattaatgcccctactgaaacgaagaataacgcaacgaacatatctctgatgggtgtcgttaggatgcttgtaacagcgtgagattttgattcagctattaatactcctgcaaaaaaggccccaaccgctactgaaatcccaagcaagtttgaaacatatgcaaagccaaaggctagaccaagtacagccactaccaaaacgtcactctgatttgtccttgcaacaaaatcgactaagcgtggaatcgttctcgaacctattatcaaaaccccagcaataaatgctatcgttatgcctatggggattaagatttctactatcgatatatttcccgttacagtggttgaatgcaataaggcaaatatagacagtattattatgtcctcaattatcagaatccctaaagtaagatatgaagcctcctctcttaggatttttaattcttctaaaaccttcattattaccactgtgctagaaacagataatgcaactgccataaacaggctatcatagaatgacatattcagtgcttgacccacaaaaaaccctgcaatcattgttccagtttgttctgctaaagttatgattgtagctctttttccaattttttttagatttcgaatggggaattccattccgactgtaaatagcagcaaaattattccaatttctgcaaataaatttaaaacctctacattgctaatgaaactgaaaggaggggtatgtggtcctatgattatacctgctcctatgtatcccaaaattagtggctgcttcaatttgtatgaaataatcgtcattaccgctgcgattatcattattgtcgcaaaatcttgtaaaatttgggttatttctatagccacagtaaaaattaatatatatattatataaataattgtaattgtttatttgacattgtgtcgaaagagctttattgacctaaatatgagattccgattctgataatgcagggttttccgaattgaaattaatttggaattacattaacaaattgtttcacagaagagtgacaccgtcttatttattccatctttaatcctagttaggggatcttttcaccttccgcagttattttataatggtcgacattatttgcactaacaaaaaaatagaaatctctttcataccctggtttaaaagttgacgaagcaggggtaatgaatctactggtttctgaaacggtggaatttttagaatcgaataattctaccagaacttttacatccctagtatcgaatgtcgaattatttatagctgtgcctttaacagttattaatcctgttggactctcccctacttcaatttctctgagctcaagattaattattgtgctagatagtgaatttataatcccttgttcttgcgagtttacttgatttgttggtagatttactagaaatatggtggctattagaacacttggaatcaaaatgaaggaatttcttattatattcactctttttcctctccctgcttaatatttcataccgtaacctagatatgaattgttcttcggaaggtaaagttttcatggtttaataaaactttaaagtttttgtatttgaaactaagattgagttaatcgtgcaataactggatgatgagattgtgaatagtactaataaaatattttaatatcaatatcttgacttattcaataaacgagaaattggcttctcatattaggaaaatctctgaattggacatgctatattttctgaaaacacattaattcggaatagatccctatagattatatttaacttactctgtccccgtcttctacttcaataatttggtcgtctggatatttgaccacctgaatatcacaatgcttgcattcgtagtattgagtgtcatgcctatgactaatagacccgttcagccatatcatcatatttccacatcttaaacaagacatagtcatatatatgactgacaaatctgtgatattaaactcttttgatttttcaataatttagattaaaagatcttttagataaatattcataaatactaaaacgtattgaccagagacgattgtaatttacataatcatttatataataaggacaaatggtaaaattatgagtttgtaccccgagcttagaattataaccagtgacaatgtaccaaaactagcaattggtatcttagccgtcatagcaatatttagtatttatatagtaggatatgatcaaggacagctttttagtatggtacaaggaagcgaagcttttgacacaatgtggcttcatgaatttactcatgatataagacacgctgccggtttcccatgtcactagactcactatatgttttctttttagcctgatattctcatagataaaacaatatttcatatattatacaatctatttatcaggatcacctctaagtacagacaatttctcattgattatggtagattgtgttgttgcttttaacccgcatttctaagttgtaaaatttatattaaaattgtatatgatagagatcgtatccatgggtaaaaaaataaatgttgcaattgccggcgtaggaaattgcgcttctgctctcgttcagggaattcactattacaattctacttcatcgtctaaggattctgtcggtcttacatcatttaaccttggaggctatgaaccaagtgatattaattttgttgctgcgtttgatattgccgaatcaaaagtaggaaaggatctgtctgaagctatcatctcaccaccaaacaatgccctgcaaattgttgatgttcctccgactggaattaaagttcaaaagggtaaagtgttagatggggcagggaggcatttttcagaggtagtaaaactttctggtgagacacatgtcgatgtttacaatgcacttaaagaaacacatgctgatattttgattaattatttgcctgtgggtagtagagaagctagcagatattatgctgaaaaatgcctagacgcaggtgtttgttttattaatgcaatcccagttttcatatcatcggattctgtttggcaaaaacgtttcgttgaaaaaaatgttccttgtgcaggcgatgatgtgatgagccaattaggtgctaccgtagttcataagactttggcaaaattgtgggtggacagaggagtctcaatagatgagacatatcaattaaatgttggtggggatatggatttctacaacatgttagatgaagaacgattggaagacaagcgagttagcaaaacttcagcggtacaggctatgataccatatgacgtgccgatgaggataggtccatctgactatgttaattttcttcaaaatgataaagtatgctatatctacatgaaaggtagattttttggaaaggtgccattagaattagatgtgaaactacgtgtccctgatgcatataatagttcaggtgtgatgattgatgcaattagaggcgccaaaatcgcacttgatagaaatatttctggatctttagagagtatctctgcgtattgttttaaacaccctccggttcagatgtcatactcaactgcgaaatctagtttcattgattttatcgaaggaaaaaaagaacgataggctaatttggtttattttcattggctcaatatccacgttgatttttgaacttattttagcatatacgttggttttgctagatcagtaatatctatccaacattttgcaatcttatcaaggcaggaaatactgtttatcattgcaattgaatatgtatcgtttatcacaatctccttatcagatgttatatgtttttttaattcagaaattgattccttaaattcttcataattttcatttaccttaaacgccttgtctctgcttgtacttgtaaaagcctcaatggaatagtgctgcatttcttccagtgaatgccccgttttcctaatcaagtcagcgatctgctttttttccttaagttcggataggtatgataccaattctgctattaaatctcccgcattttctagataattagctgctatcctgtaatcaagcatgtctatattacttagattcaggttgcttgcaagtttcttattcataatagctgttcttattactctaactaaaaggaaatattgtctgtctatttcatcgtctcgactgtcaattttcttctttagatctcttccaaagccttcactaagtgaacgaatagtttccttgaacattcctgttatgattgaattcatcatactcaatattttttcaatgtttagagttttagcatcaattaagaattgaagatgtatgttatagctattctcatctacaatctctagtccaattaattttctagtagccctttttattgtttcactatcttcaaatgatatctgattcttcgaatgtatgtttatcatattataccccaataggtaagcaccaaaaatcttgtttagaaggattttgattgatttatccttaatttctacctgttcagcagcgtcattttttgattgttggttactattctcctgcccatactcaaattctatctttatttcttcgtcttggtaattatcataaattgaaatggtgttgtcgatgttagtttctatggttaggctgtttcccttacctagtgagtttttctttatccaatcatttggaagcgatataagaatactactgccgatttgttgtaatattcgagtatatattgtcataatttgtatatatgaatataaataaattatactatatttttatatttacttttgatattaatagagtatagtggttttagttactgaagtgcctgtggcagtggcaaaagcgtatagtcctggtcacattactggtttcttttccacaccggattcacatatttcaacaatagatccaaaatttcttggatctatgggtgctggttttagcattgataaaggaattacatctaccgttaaagtattttcttcaaatgaaaaaaactatgaaataaaacttaacgggatccctaattttgagctaaaggtatcaaattttgtcatagcatcttatatgcgggtaatccgtgagcctgtttatctttcaattgaacatgaatctgatttacctattgggtatggtttgggatctagtggctcggccgctctaagtctttcttatgcccttaatgaggcgttaaagaccaacctaaccaaagtccaagcagctcaaatagcacataacgctgatgtagtttgtagaactggactgggaacagtgatatcggaatttacaggtggttttgagtttcgattgagtgttggcggacctggcattggccgagttatcaaatctaaattgtcaacagactggtgcgttatcgttttatgccttgaacctattaaaacagaactatggttagataagtgggttacaagtgagaacaaacactctttgaatcttctgggtagaaaaatggtaaatgttttacatcaagatccaaaagtggaatcatttcttgagatgtcttatcaatttgctcatgaatatcatttggataagggcaaatgtcaaaacccactaaaccttatgcaggcagaaggcattcaggctagtgttgcactctttggacatactttatttactctgaccgaaagagacaaggtacctagaattgtgaaattactagaacaatttaagggccaattactggtgtgtggcgttgataatttgggtgccagattagttagaagaaatgactaagtatggaaaggaaaataaaattacatgagagtcatccaaggtatttatcattgttagcacgagaaaaactggtaacaggtttcaagcggggtttagtagcatcagagggtctaatcgctcacgggagaggggaatgctttgactatttgctaggagaatgcacaacagaatccgctagatcggccataaatgttgcttctgccatcttattactcgctaaatatccggtaatttctataaatggtaacgtggcagctctatgcgtagaccagatatgtgggttaaatagatctctagaatactcagctgttgaaataaatcttttttactatacaaaagagagagaaaagttgatatctgaagaattcaaaaaatacggattgacaagaatatttggtattgatcccaaaaatcttgtaagcattcctgaactagagagcaacagaagatttgtcgacagggacggaatatctaaagctgacgttgtctttgtacctctagaggatggtgatagaaccatagccttaaaacggatgaataagaaagtcatcactgtagatttgaacccactttcaagaactgcattgtcatcggatataacaatagtcgataatattgtaagggtaattccccaacttatcaaatgcgtggaatatcatagaaaccattctagtgaaaatgaccttaagaatcttattgagagctttgataatttagatggcctaaaaaaggcacttgaagtaatgaaatccaaacagattctatttcaataaaaatgaaccaggtattcattctactgggttttttagactcttatgttgggagttatgattagatctgattccaaacatcagtattttacaacaaaaaaagaaagaaagtgaaaagatcacagttgtaactgcttatgactacaccacttcaaggatttgtgatgaatccggagttgatatattacttgttggtgacagtgcaggtatggttatgcttggatactcaagtaccatacctgttactatggaagaaatgatggtctattgcagaggtgttattaatggatcaaacaatactgtaatcattgctgatatgccctttgggtcgtaccaatttgatcagtcattggcttttttaaatgccacgaaatttattaaattaggttgtcacggtgtaaaaattgaaggtggtgtcgaagttgttcctattataaagaaacttacggaatatggaatcccagttatggggcatattggattaaagcctcagacctcattactatgggagggttataaggttcaggggaggaccgctaatgctgcaatcttattgcatcaacaggcaatagaattagaaaaagctggagcttttagtttagtactagaattagtgaccagtcaagtggctgaacaaatttccagatcactaactattccaacgattgggataggttcaggtagcgggtgtgatggccaagttttagtatttcaagatctagttggatcctataataactttaaaccaaaatttgtaaagcgatatctagaatcttttcctttaatattagatgcgatgaaaaattatgtttcagacgtaaaaaatggtaaatttccagacgctgatcattcattttttattgcagaagaggagttattgagattcaataaatatcttaatacaaaagcgaatattcgcaggttgaatctggaataaatcggatcgaattgaaatggtagaagatgaatccctcattagaagatccgttgatagtaacaacgatgataaatttgatgtacacccgtcaaaggatattaaatgcactttgggaaatgaattatttggaaaaagaattgtaatttgtgtcaccgctagtgtagcttgttacaaggcgattgacttgatcagattattgatgagacatggcgctgaagtatttgtggtaatctcaaagacggttgaaaaatttatgaataaagattattttttgtgggccagtgggaatccggttatatcagaactttctggaaatttggaacatgtaagaatagctaattttaaaacatccgacctgataatagtatatccatgcacagctaataccataggcaaatttgcaaatggaattgatgatacccccgtaacttcagttttatcgatagggctaggagcaagagtacctataataattgctcctgcgatgcatgatgctatgtaccaaaacacgataatcaaacaaaatatacaagatttagaaaaaattggaatagtgtttgtaaatccgatccttgaagaagacaaggccaaggctgcaaccgttgaatccgtgttattacaaagtgttgatcttgtcaaaaatcaaacttcaaattctgggaaaaataattcaatcccaaacgatcatttagattggtttttctgtaaatgttcgattaatgattcgattcaattaggtaatgaacaaatgcgatcatttttgaaaaatagaaagattttgatatctacgggcagtaccgttgagcacatagatccaattcgggtcatttctaataccagttccggtaaaatgggttattttctgttaaagaaggctattgatttgggattagatgttactcttgttaaaggatcgacaatgatcgatttagaatatactaaattgaaggacaagtttgattttaagatggttgaagttagaacaagtcaacaaatgctgggtagtgtaatgggggagttatcttcaagaccttatgacataatcatacttgctgcagcagtttctgattttagacccgaattttcttcgagtgataaaattacaaccgaccgcgattcttttgtcattaaacttgtgccaactagcaaaatagtcaatcaagtcaaaaacatccaaagaaagacgttcttagttgcttttaaagctgaatatcacgtttcagaccgaattttaatggaaagatcatatcggaaactactggattctgatgccgatatggttgttgccaatgacgtaggcactgaaggagcacttgttggctcagattccaataagatcatgattgtagataaattcaagaattattatgattttccccttcaaaataaagaatctgttgcagaaaacattctaaaattgatatacgtaaatttatctggtaggcaacgaaatgatgaatactaggttaaagtctaataccaaataaatacggcctaataatatccatatatttatgattaatccctctgttttataggccttgttaacaagaccattattttatcatgttgatttaagtaaagatccgcacagttttgaatatctttaatttaccattctataacttgggctgaatgagaacatctcaactgtggttttccccttcatgtaatgcacatagcccgttcaatgacaatttatagttttcaccgaaaggagtcattcagtgattagtgtgagtataatatcaaagattgtagaataaataaaattcctagccgaataattccaatatcttgtcagaaattatttttgaagtatcgccttttccgaaaatttgttttctattcgaactagatggataccatgatttgattgctctaataattttttcactgtctgttccaaccaatgtattccatccttcttctatggtctcaacccactctgtattatttctgatagtaatacatggaacagatagcaaaaacgattccttttggatccctccggaatccgtcacaatctttgtagaattacgcatcaactgaacaaaatcagtataccctacaggttgtattatcttaacgttcttgcaggccaaaatcctctcatacaaattattcaattttaatatactcatagtcctcgggtgaataggaaaaactacctttatatgatttattctctccatagttttgattactgacagtaagttttctgcttgggatgtattttctgcccggtgcattgtaaacaatatgtatgaatccggttctaagtccaacatcgaaagaatttgggattgtcttgacatttttagatattctgcaagtacctcaacagacaaatcgcctgtttggaatatttgccctgataaattggcttttttaatattttcaacggctgtatcagtgggtgcaaataaatagtggctcagattgtcagtcaaaatgcgattgatctcctcgggcatattcttgtcaaagcttctgattccggcttcaacatgagcaatcttaatattagatttgaaagccgcaaaagctcccgcaaatgtggagttcgtatcgccatagactattgctaaatcgaattgatgttcattgatcaccttctcggtttgttttatcatctcaccaacctggtagcatgatgtcccagaaccaatttcgagattgaaatccggtttaggaaggttaaattcattaaagaatattccagacatctcaaaatcataatgttgaccagtgtgaattataatgtgtgtaactttgccttttaatcttctataaatgggagcaagtttaataaaattaggccgtgcccccacaattgaaacaatacttttacgtctatacattaaatgcataatacataaaaagatggacttaaatacctatgataggataacattgtcattcgcttatctaataacctatgataggttaagaaaaaacttatccttttttcataacttcaaatagtttctattgtgttatgagttaaagctgtagcgagtacgggacaacaacgttgtgtcttgaatttatatctatcagagtcattgtagattaacttctaaatgatagtctcataattctatacagcggagggtgtgccatgtttcagaagaaaatttgggtgagctgatcgagtgtgatcttttggcaaaacaaagataaaacctataagactaacagccaccagttcataattgatctaattagtatgatgattctttcaaaaatcgttgacgtaccaatgaggcggtcctatctgtaccatgcgaccattatcctaaaatattttatatttcgaatttggattggccaatctaattcatgtaggttattgcttcactttcataccataaacctatcatttagcagaaagatgatgggagtaaggattgtttgctactgaatcacatttgacaagtaattggcatctgagtggtcactaaaacctttctcaggtgatatcaaagagaggtaataagattgggtaatttgtttgctttaaaaggagataagatcaaacttttgaaatatctatgtacagaccctttcttgaagtccataaaggtacagtattgggcaagtcatcggtgtagaaaaaatgacgcctctttctgatataatgatggatacagcatgaagtattagttatatgaggccgggtcattattccaaacaaataaagctagtctcatagagtatcatatcttgcttgaaacagatactatccacaagaccagtcagggataattcgtcatccattctaattagtattctgtattttatcgggttgattgattggtcaggtaactctgtcaaatctcatcataataacaagagaggtagaccttacgtgtactcaccaatcgtaatccttcgatgctttatagtccgtatctggtttagacttgattcaaacaggtcactgcatcattttctatctttggatttatcctataacagaaagattttgaaggcgtgcgggttatctgtatcgtacttaccaccaagtagacgcaccttcgataggcgattgaaaactatgtctaccgacatcaaggaaaggattgcaataatgggaagcctatttgtcattggaggattagtcagaccatagatagttgcaacagacacagcccttttaagatcaaatggtcatgtgtggcacaaatcgtcaatgaaagaaggtgtagtacctagatcgggaatcgacacagatgcaaggtggggtcgcagtcgtaccaaagggtggctatttggatacaaactgcatatgatatccagtaccgatccttcttctacaatggtaccactatcagccgatgttaccacagccaatatatcagacaaacctgtttatccagacgtagtagcctatctatctccagaaatattatggaaaatacattttatgatagcagacccgggctatgatggtaagaaactgtatgacctaagcatggttaagggattccaactcgtatgtcctgttagaagatacaaaagaaccaaagaagaaagactgaaaccagttgagttttatgagtcggctctgggacaggtcgtgtattctaggagaagtacttctatagaaccgctgatagagcacataaaacctgtttttaggatatacccagtaccggtgaaaagattggataaggtacgtggtatcgtcctgttatccgtattactgtatcagatacttgtttattataactgcaagatgcgaaaagatggtcctagaaaatcaatcaaatacatgataggctgttaatcaattaagaaactagaataaattattaaaatgaattatgacccacactcagttatatccaggacttaatatttggattaacctgtatatattatcaaacactggtactcttattatagctctgcctgctgatgttacaactgcatagccatgtttatcctgcaattgagttcaatttctcttcagaaataataagaatgcccattgaatggtaacatatcctagttactattaacataatctatataaatcaagcattggtatggattcttccatagtcctacccatcagtcgataaaaaatatttcaataggaaaacttgaatggtcgattcttatgattctatattagattaattagtatactagaaaagaagaatagacatggcacatagcaactcggtctttaggatggatttagtatcccgtagaagttaacacaattgcactatcgtactactttatgtattattctatcgattggatcactatattagcatgatgattgacttaacttaactacttatattctaaatttaatggaaattttgtcgtttacccaatggattcggagcaacagcctctgtgtagaacgtgacggcattcatggatttaggtggaatttaaactacgccgtaaacaataggaatactaatcgatatcaaaatcatgtcttgttcaaataaaattatataaagaggtcaaaagtaacactatcatttgtcattaagtaacttattgagtcgtcagaatgatattttagttatgcccggtgtatacgatgctttgaccgccaagattgctgaacaagtagggtttgaggctatttttcaaactggatacggaacttcggcgtcattgttagcattgccagattttggattcttaagcattaccgagactgttgaaaatgcacggaggataactcgagcagttgatataccattaattgtagatgtagatactggatacggtaatcctttaactgtatccaaattagtaaatgatttacaaagaataggagcatcggggatcttccttgaagatcaagtttggccaaaaaggtgtggtcatatgatgggtaaggaagttatcgattctcaagaatacattcaaaaactaaggtctgctattgatgctaagaaaaaggactcagatttcacaatcgtggccagaactgatgctatggccccactgggcattgaagaggctataaagaggggaaaattatatagagaaattggtgctgacatcgtttttgtggaggccccgcgttctgtcgaagatatgaaaaaaattgccgatcaaattgatgccccattagtagctaacatgatagaggaaggtataacacctaatttgacctcgactgaacttttagaaatgggttacaaaattgccctcttcccgctttctggattatattcctccgcttttgcgttatttgaaacgttcaagactttgaaagagacaggtaccacgaagacgctaaaagataaaatgatgaagtttaaggaatttaataaactagttagcctggataaatacatgaccatggaaaacaaatatgtttgattctatgtcaataacctaaacttgactattgttgaatgcatattttgctttttctatcctattagtttttggcattggctgtttaattgggatcattccaataatccaaaactttccatatcctgtaggctacgattctataaattactatctacctgctctctatgatctgaattctaaccccgtaattgggggaacattatttccagtttatgtatttttggtatattcctttcatttgatctctttctccgatctatatcttgcctttaacgttgtaaacattatattatatggatctcttagcgttaccacgttccttttaggtactggtgtattagacaatcagttaataaaagtatattgtttgccatttttgttatattccagctaagtgccctgagaatggcatgggatctacatagagatattttggcacttgtttgtcttaaccttagtttagttaccataaaccatttgaggtcaaatcatttcaatagacctatactcttacaatacgttactgttagtgtcctgtatctagctacattattttctgatagaatgatgggagttttattaattatatcatcaatctgcttttctatcagatataaactccttcttctaggtactattaatttactattactaacattatttctaacttacttctttttgttagatgatataacttttgtttctattgggtcgaatccagtagatacattagtgaatcctgtatataacaaaaataatctatctccttacgatttacttgtattgcaactttcactatatgggatcctcattccatttttcattgtaggttttcttaaaaagtcaaattcgttaatcctcaagattcccactctagtgacaattttactatcatttagttggctcctcatccctaatcatagttatttggtaccggagcgttggattattctttcaggattttttatttccatcttcggactatatgggttcttctttatcgctgatagattagtaaattcaaaacttagaaatctagtttcggtcttatttgtttcttcttttattacttatggaattttatttatagttctcccttatggaattgtttttaccatcccttctatatttcaaacccaaactggactaacaatcccgctgtccatgtcttttaattcactagagatatccaagaatcaggacttggtgaattctatagattggattaataccaatacgaagaataatgcagaaattattggaacactgcactggcgagggtggtttcatttatttttagaaaaaccacgtcaatatattttttctgagactgtatctttacctagtaattattcctcaattgagaaaaatgaaaatgcattgtacgataacctgaaaagcaaaattgattttcagtgtgttaaagtgggggattatacaaacactagttccgtttctgaaaatgaaaaaaatatttacttgatcgattctaaatcgggtcactatgatatttattactattaccctatagtttatgattcaaaatattttaatatttatgaaattactaattcaatttgtgggtgatctttgcataattctatcctggtttaattaatgatttaattttatctacttgggtctttctgttaaattttctaatatcatccgggtacatgctatcatatccttcaagcttcggtctataagatatataatgatataacatatataaggctccaaccctaccaataggcttactggtaccaaaatataggaaaaatctcccaaatgcgaataatggatgataacccagggttctcatactagcgccgaattcatagaaatgatgattttgtccaaggggtcgagtgtgctcaaattttgcctcttctaggatggtctctttatatccactttttcttgatgcaatcaaaatagcggattcatatcccattttctcaggatattgagcgtattctttataaaagaaggaatttctgacaaatctacctgctccacgaggagtcttataactaccatcatcaatattcccagatacgatagcataatctgcgttattatccataaattcaattatttttttagcataatcgttataatagatagtatcatcagtacctatcatatgataatctgtttcctccaactttttttcagctttcagagccaaggctttgttccagttcttaaccactctagaaatgtcataacccaaatcaggattagagatgatatataagttatcgactctattagataactcttttaaaattgttccagtattgtctttagagccgtcatctattacaattatatatgatggttttatggtttggtttgataacgacattatggctttttcaatatcgttttcggaatttctacatgttacaattgtaaaataagttcccatatggcctaaaatggtttataaatatataatctaagtgtatttcattatttctatgatttacccaactgataatttttgtttccatttgatttacccttataattaacatgaaaaagattattgaatttaaacccaattttcgaaaagattctcatggatactagataccagatgggattatgattgtaatcgagatgaaaaatattataaatagataaatgatcatcttatctcatttaataaatatatcaaatttataatttagcgctggatttcagtgtatgtgaaataaatattctataccatatttcaaaagacaagacagataataacttgctaatataccttatccttaaattattattagttgaattacctgccaaagaaatggattcatttatccattttatgttgatgatatcatttttaacagattcagaatctgtatgtaaatatgctgtaataatttgtttaccataattatcccacatatttaccaaatttagtgaaaaacctttttttatcgctggaatatttccattccctttcgatttttttagaattgatatgagaggtaattttcctacatttttagcataatcgtatttaatatgccatggtaatctggaagtaaattcaatcatctctggatttaaaaacaaggaatttatgtccatatctagatgtttgccgaattttaagtttgaaggtatccaatcatataatagctttccattaaaatctgcaagaaatacctgatctaaaggttccagtgaactatcgaaatactgtttaaaattttcatatatccttatccaagaaaattttaaattcttattgaagatttcttcttgatttggaacccagtcacgttcgtgacatgataaataaattcttgatttatcaagccatgaaggattttttagtttgtttaattcggttaggtatttgtaataacgaaaaacgtatccaccaaatatctcgtcgcctccatcgccagagtagaaaattttagaataatctttagctttttctagtgtataaaattgatataaattccattttggcgtacctacaaaggaaatcaattttggtagatctacaagaatattgtttaggtatatttcgtgaaattcgcaattatatttttcggcaatatcttttgcgactgaaatttcatcatcgtcatcaccaaagccagcacaaattgcatcaatttttaattccgggaaaaattttcttaacatcactaacgtgaatctggaatctatacctccactcaaagcaatagaaacccttggcactttcatatgagataattttgaatccaagtccttttttacaatttgcagtacctttggctcaatatcttcaattttcccccaaataggcttctccggttttaatggcacatcaagactgtcaacagatggattatatcttaaagttaggaaattaataatatcgtccttctttaagatttgagccatactttaatatacatacttagattgtttaataaatttagtgaattaaatgatattaacaactttttagataatgttattaaacttaaaattagacattgatatactatttcttcttatttttacaaataattatctaatagttttatatttaatgcaaactatttgggggtttattaaattatattaaatccgattattatattacgatctaatatatttgattaaatatctttatctaattaagataaaatagtatttttaccttgaagatagctcatatcaataatatctctggtgtggcatccattctttctaaatatcaaagacaacaaggattagaggtggatgtttttgtttttaacaaaaccatctatgaacaattcggtggtattctgattaattataaatctcctttctctagatggaatatattaaagaaactcaaaaaacattatgatgtcttacattatcattacccttatggttcattaaagagaagtttagagaaattaaataaggaaaaaatatatttaaaacattaccatggcaatgatataaggggaaagtatgaccctgatccttgtctcgtctctactcccgatctgctacagtacgccccaaatggtatatggttaccaaacccagttgatattgatgagataaaccaaatagttactaacagagatttggataatagaaatgggccacttaggttagcccactatccatactataaaaattacccatcaaccttcactgattattattctgagaccttgtctagtgttaaaagagaaaataaatgtgaaatattagaaatttttagattgtctaatcaagaaactcttcaacttatagcttactcggatattgttattggaaaaattttacctgatgtaggatggtttggaaagtttgaacttgaagctatggctctaggtaaacctgttattgcttacgtttcggatgaattatttgaaaaatacaaacccccgatttttagaactaccaaaaatacctttcaggaggatctaaaatatctaattgaaaatgaccagcagagacatagactgactaatgaaggacctgcttatatcagaaaaaatcatagcatagctgacatcatagctaccattaatagatattatcgtaattaatttttttgaaaacatcggacctttaactgtcgaatctatagaaattttttatgttaaagtggatgattatttcattctactttaaattttataaacccttgactattcaatttattcagatttaacactttttatatgcttcaaaaatattattttcgttattttcccatagcagattatttctagcgtaattaaaaatttctattcttttcttgtataattcattcatattttctttaagatactttatcttacatatcaagtcttcatatccatcaaatgtcacacaatttttttctaatatatctattactggcttaaatgatgatgttaatattactattagtcctgaatgtgcatattcatacgctttatttggactagtgaattcatgggaccaatgtcttttccaaggtaaaagtcctattgaatgatttgacatctctttaaacattagattcctgtccaagaaacctctatagttaacttttaaggacgattttccttcccatcctataatagatagatcacctaagtcttgattatcaaataattccggtaatccatcaatatttcgattgggtaacttttgaatattgtgaccatcagagcctgcatagacgcttgatagtctatcatagaatttaggagtctcaaaagactcggtttcaaacttcataggaaaattaggaataacaaatatgtcgttgttgaaacgatttattattcgcaaatcatcagcaatcttatttgatactgttattgttggatttgatccgactacttccttctcccacttggcccataggtgaattatgcgatgattaataatccttcttcttattcttattggcatctgaattatcttgttaatgcttgtcctattgctacttgcttctgaatatttttcaatttcaactaataatagtgaatgttttgaccaatattcatgatcatcatatacaaaaggcattttgaattctttaaccatttttgcagaaaaaatgttatgagcatgaattatgtctggtcttgattcttttaatatcctttcaacttgtttctttacggaattccaataaaaaggtattccatatcttgctttggctgtccaattaacttcaaaaatattagaaaaaacttccctcttataaaggggggagactttagatcccgcaaatgtaacctcatgtccacgattcgatgcactaatagctgatttttcaattctccaatctggtagagcctcatgcgataaatgtaaaattctcaaattttagttatgaagattatacattagtcaaataaatacttagataaaaattaatatgaaaatttcacttgattatttgtgattgtaaaagtaatttgaggattatatgtcaatcctatatcatctttatcttgttactatactaaattagcagaacatgatcctttgatatcgtgtatagaaaaacatcgacatatggtctcggatgaaatgataaaacaatttatgtttagataatctgatttcattcattactactttataaatgaccttatattttattattgaaaaatttagttattcttattccaattattttacttgcatccggttacataaactcattataatgcatatttgtatttttgtagattaaaatatacctccgtaaggtattttgatcaaaaaggaaatagatcaatccattatgtttttgtaaatattggataaactgtttgtgacattcgaaggacaatgctgcggaggtaggcccctcaaattattcaatcgatgatctattacatttagaccacaagataatgcttctaaagcggttttacttaaagcgggtatcaatttattatttatatatctaatatctacataagtatcaaattgtttaagaaattctggcatttcttggtaattgatcgtctgcttcattctatcatgaatcttaatttcggaatcaaaattattctctttcagatattttaatgccattttagtatcagttgcttcattatcgattgttaaagctctacttttgaaatctttcctgaagcctttgatatctggcctaaagtgttctatatcaataggatttggaagatatatagccttaacattattctttgaggcagtatagttgagcagatcaattgttgaaactaaaactgcatcagcgacaatttgtgcttttaattttatcctttttttcaataatattgtatctcttccctttctgtacgtcaagattaatctaatgatcgtatctgacaatcttgatctatggggaagcttttgattttttatacctcttatatctgtcccatgataatgtataattattttttttgaattactaaattttttacgaagttttattatgatgtcgcttctaccatgaacgtgaataatatccattgtttccgcttccttaaaaacataattcagaaattgttcttcagttttaacctgcgtgatatattctttataatattcataaatgccatatttatcaactctgctaagctttatgacccttgaatcatgaccataaattttttgttgatatttggctaaaatacatgccactccagcttcatcatttacatggaggattcgcaatctataacacaattatacaatagaggattaggtataaactaactgatgtagttgattttggaccgattttttatttcatatttgtatgattcttatctccggacgatttttattatatatatctggtattaaatgtgatttctaaatacatcgctaattcatatttgaatagtctctttatgatcttgccaattagttttttctactcatttttattttttttagatcctagttttggaaataagattaatgttctcttatctagttagcacactttttttctaatgcatttattaagttactttttttatggatttattccccatctcgttaaatcaatattgcctatagtcatataaccgctaatgaaaatttagtaattgggatgaatgatgaattaaaatcatcaaaactatctttgagttttagtttgatttagctatgataaataaatattaaaatattacctttttagtagattggtatttatatatattttttatatatatgatcatcatatttcatggaaagtgatgaagatattaaaaactattgggagaaccgattgtctaataattatggtttacatggaacaggtttcattggattgggtaagaactataataaatggatgtacagggttagacgacacgtttttctaaagaaaataaaagatcttaatattgaaagttctcaggtcgatatcttggacataggctctggcaccggtttttatataagtctttggaaagaattgatgctgccaaatgttacaggttgtgatttgacaaaaactgctgtaacaaacctgaaagcgaaatttcccgattttagattcttagaatttgatataggtgatgatactataccaatatctgaaaagtttgatataatatccgcattcgatgttctatttcacatagtagatgatacgaaatatttaaaagcgttagaaaatatcaaaaacctgttaaaacctggaggaatttttattttttcagaaaattttgtacatgacgaatcaaaatatgccaaatttcaaaccacccgatctttaaaggaaattcagggcagtcttgaaaacctcggatttattgttttggaaaggtccccaatgtttttcctgatgaatgctccggttgattcaaaaaacagattattgaataagatgtggcgaatgattactaaaaacgtatcccgtggtgaaaagtttggattaattattggcactattttgtttcctttagagatttttattatatctattacaaaagaaagccctaccaccgaaattatgatttgcaaaaattcacaataaaaggaaaattttattttcttatctgcccctgatgattttataaaacacagcagcacctggtattacagcaaaggccatctttaaggattttttgaatggagattcattgtgttttcttaatattcgtatattattttttaaatctttaatggttcctttggtttttgtaacatagcaaatcaacgagactctatctctgattgtataacattctcctatctcttgaaggtctctaatcgaccatactgatctatgggtttcaaagatatttccaaatgcatcctcctgagggctaggattcagaggagtgcttatcaatagtcctttatttttattcaataaaccattgagtaattctaagccctcgtcttttttgaaatgttctattacgtcaattaacaaaattaaatcatatttaaaagatagattgtgatataattctcctatatttttattgtataaattattataaatgtactcgtgtaatggcgtaatataattactaaaaacttctacaccatcgattcttttattgaactcgtatttttgttcgccattccataaatctagatattctctgcataatactccgtatttcccatacccacttccaatatccagaacagaattgggttttaaagcgattatgatttccattatttttgaaatatggtaatattgactagatggcatgtttaatctatccacaatttctgcttaagaattttttgtatttatataatttctaagtagttacacgtggaattcttgtaatgggaaattatttggtattttgttcttaactttttgaacaaaaaatgaatttggatcacgccatatattacttttttaactgcttttagtcgcgtattctaactattaccttagcccaattaaaatatattaattttattgttatattttgatgatattccaaattaacatttgttgatacagtggattagcattaggtgctgaatgttttatcaattttatatattcatctattattctgaattgtatgttatatccagtgtcaaatatggcaaataagcacgacactttagcatatattcgtggcctaacttttgaatataagaaatcttaacgactaccaaaatgtgaatatatctatctattccacccaacgtaaaacttaatcgcattattgccttttttgattggcaaaggacgcccaaactctttacaaataaaaattttaaaatacctctacctattagcacatttggaaaaaatacttgtttaatatgaatttttatttgattttctagattaaaaattcctgttaatcgcaaaactaaattagagaaccctaattaatactcataatagatgataccaaaaatatccaaagtattctttaggcgacgatggttagattttaggaatgggcatagtatatatctcgtatttttattaacttttattaactttatcttaatatcgtacaactttttaataaagcaattaccgtttggaattggtgattacatgacccttcctatgttcatacttttgttcgctttgatctacattcctaccgccattactctaggtgtttggcatagaaagcatcaatattctgtagaaaatgaagctttgctaagacaaaactggatgtgggcttggattagccaataccaaataagattgattaagggtaaaacgaatccaaaggaggatgaatatattattaaatatttaaatgatatcttgataaggacaaataagagtgagttattgggggatgataatatttccaagttacccaaagaagaaaaatctgaagacaaaaagtagtttacattagggctcaaagagcatttaccaatctcctcattttttcaaagtcgatttcaaaaccaaacctcttttcatccttcttcatgttcttgtacatgctcaataataaattaaaatgcttcacagtacttaatttcccgtccattttgagtctaacaattcggtaaacatcatagtaatagttgaatttctttagaattttttccctgtattgtttatgatcaaatttcactttattgttcttgttgtcctccatcacttgcaaaaatatttcacagcttagcaatgatgggataatgccttcaccaagcattggaaacaccgtacctatagattctcctatgcctatgatttttccgtcataaaaaggttccatcagcttgggtggtgcaagtcgtatgggcctgccaatttttctgattatccgcgcatccgggtgagtgtctaagaattcttttaccccgtgatatttcctgtcaatatctcctgcccccataaaacccgcgcctttacttaaaggaaagtaccaaaagtaccctctcgcacccttatatcctataacatgaaattcatcaatatcttgaatgttttcaaccatatactcatacgctggaatcacaaaatcttctcggggtttaggtagaaatttcctgtggaaacctgtacaatctaaaacataatcatatttatctatgggaaacgtctttttatcacagttaataccatactctaccgtgataccagcgagcaaatcactctcccattgcttcttattgtaggtaactagtccatctaaatcaagaaactcctctttttgatttggcaatcccattcttagtctttttcctacatgaaaaacataattatcaaaattaagccctgccttattagagaagtattctaacatatgtcttgacgctccccatgcacataccggccagtgcatttctttcttatttgattcaaagatagttatttcgtggccaattttatgtaacatcccgcctagataacttcctgctacgccggctccaatcacagctatcttcaattgatatagttaggctcgtaataatattaatatttgtatacccttatatgaaatatgtacccgagtgatcgattatatataacgatttattacaaaaaaagttctaatcaatctgattattatttatttatatctgatagaaagtaatcttgagttacgtaaaaacaacagtttcccatatatattatacaattgattgtttgtttgaatgaataacaaaatatatctcatggcggcattaattgcatttgcatctgttggtgctttgttaatacaaccaactgtagcatcagcacaaagcagcatgatagacaatattttgaacagtgctctcccctcctctgatactaatgataataatcaaccatcacaagaaaatagcagcagcagcagcagcgcagtcccattaagcaccagcttatcttgtggtcaagttattaaacaaagtgtaaaactgacagccaaccttgattgtaagactgatggcataattgtaggtgctgatggtattacaatagatttgaatggatttacattaagtggtccaggagaaaagagttctaaggtcggaatcatgtttgcagacaacgatggcgtaactgttcaaggtccaggaactattaagagcttccaagcaggtgcattattctcaggtggagaagacaacaaaatttcaagagtcacattcacagaaaatgaaatcgcagtatttgaaacaggatcaaagaatgtagtaattgaagacaatctaatgtttggaaacagcattggtgtagcagctcactcctcatcaggctcacagttaaccacaaacctattcaaagcaaatgacttagcaggtgtgacattagttaactccgcaagcaatgagttgtcaatgaatacaatccaagggtctgttaacggtatcttcctagatggccaaagcacaaagaacaacgtgaattcaaataacgtattgcaaaaccgtggtgtagatttgaataacggtaacggtctaccaacaaacataaatgacaacgtgttcagcgacaataactgtaatacatctgtcccagacggtttatgtttgggtagataaacctccctttttctttttaaataggacgatatctaaaatttcattttcaatttaaaaatcgatcggcattttagaaatatatttattttatcgcagattaacagacttgttatgaatattaaccctccccttgaaagagtcgcttttgtttccctatcttttatcatcgtaccaatctttattctggcattttcgagtccccaattgacttcagaaatttatatacatggccaagaaacgaattcttctaataatgatgaattcttattaaacatcaatcaaacttatctatctttaattccattaatgatcgaggaagttcaaaacaccaacgccagcgatattcctatcaaacaaataatggaggctactccttccaacgcaacagccctccaagatattgtcaaaaataattctaataaaactgctcaaaacaatgacagtgctactttaaacaatgctactgtcaacaacagcaacccagctagacctcaggatctcattccagtcgttgttaatatgactcaaaacaccaacgccagcgatattcctatcaaaaatgtaattaatactgttccttccaacgcaacagccctccaagatattgtcaaaaataattctaataaaactgctcaaaacaatgacagtgctactttaaacaatgctactgtcaacaacagcaacccagctagacctcaggatctcattccagtcgttgttaatatgactcaaaacaccaacgccagcgatattcctatcaaaaatgtaattaatactgttccttccaacgcaacagccctccaagatattgtcaaaaataattctaataaaactgctcaaaacaatgacagtgctactttaaacaatgctactgtcaacaacagcaacccagctagacctcaggatctcattccagtcgttgttaatatgactcaaaacaccaacgccagtgacttgggatttatgcgaattattaatgcattaccaggatacgatacctctgaatcaaataatgcgaatttcctaaaatgatattacatatgagaatttgaaataatgatcaaatgatattttttatatctgaccatttaccgaattgtctgtgtaggcatccataattcgataccttatatacttgtcatcaagcgaaaatttcggaggatgtggatcattagtctcagacttacaaattggacatttatcttttaacgtatattgcttgcacaatctacaaattctaatccggtgtttcatatctgttcgattggttaaatgtttgtatgagttttctttgattcttcccttgtaaatttaaaaatacccgaatttttttctatattcgtctttattttttctatagcatgattgagtgctttctcggcaattttaaaattttccgctgtaactgtgatcctgtattttggggcacctatataggttatatctattttagaattatttttggatccatctacagatcctaaaatattcttgatggtgtcgataccgtcacccttccttacagtaatatctaaaactgccctgacttcaatatgtgggatctgaatcttcttactttctagttctattgcatcaatgacttctggttttaaatcaagagtagataatacttcaggccctttaatggctactgcttcaaatgcatcatagatgaaatcatatttctgacttattttttcttcaatctctcttatactattttgatcatagcctagattagtctttataacgtccataaaattagcgcccttttcgtctttttttacttccataactttcgccttcttttcttcgccagtaacctgctttaacgaaaggtctacctctgaccttattggattaactctgattaccttgaggactgttttttgcttagcctttacatacctctcaatatttctgatccagcccgtagcaatttctgatatatgtaaaaacgcagtaagattgtcatactcgtcaagggttacatatgctccatgacccgtaacttctttgattgtaactataactatttctcccaaatcggggagttttttggtttctgaaatactcactatgtttaaaccaatttgttagattaattaattttgcttttatgaacttctaataatcaatgccttttttcgccttaatcccttttttatatgggtgtttgatttctttcatttccgtaaccaaatcagcaatctgaagtatgttgtccgtcaagtggttcccagtcaatattacagttacatcaggtggttttgaatctaagagggaaataatctctttttcttctactaatccaagcttcaaagcataattaatttcgtccaatatgacaatactatattttccagaatctattttctccttagcgattgccaaagcatttttagatgattctacatgctccataaaatcatgatcatcgtctattataccaacgaatccttttcctgttattactaattcaaaatttggttttaatctgtttgagctatatatttctccgtaattccactctccctttatgaactgaatcatacagacattcaattcgtatcctattgctcttaaggcaacacctaaagctgcagtagtcttaccttttcccttaccataatatacaattattaatcctttatccatagtcgtctcccatagtggtgattcaagtttactcgatatctctatttattatgttcatctaatgcgaatgacatctaatgacccctggtttcactatgacgtcaatatgtatttaccatatcattaaaattcattttcaagccctacatggccgttgtataagtaggaaaattatgcacgggaagaatcgaattcaaaaaaattggccgatcgcaattgatttaaatcaactctaccacttattggttttataattataacctgtgtcccagttaacgccaagcaagattaagtttaccatagaaaatgacttttgcagattagtaactttttttaaagataaaccacacggtacccgtttcacacatctacaaagacaattttttttatatttcaaccgattaaaaagcaaaaaattattcaacattaagaaaaatcctaatgtcagtttaactgtggatatttacatatcaaatttgaagtaggggttcattgtaaatgggtagtcagaatagtcaaaaatgatcaaatatatgacaaaatttatctgcttttttatagcaagtttgagtgggttcgaaatgatccgtggaatgaaggggagtctccttttttaaattaaaactttaaacaaatgtttgttggggaattaactgatttgtacattaaatttcgattggagcaagcagctggagttgtctgtaaagctatctatccaatccctgtttcttcgtttaaaggaaaaggtacggaggttgctgtttgtacactttcgagtatggcccttttgaaaaagatttctagtgatgctatcatggacaagcttttaattgtagggcgtttattttctgaaaacaaaggaatagagcagctaattcagttttgcacaacttctccagctatgagatatttgattttgtgcggaaaagatactaacggtcattacccagcggacgcattgatgaatttaatgcattttggattagatgaacagaacaaaataataggaaccaaggcaccttatccatttataagatgccatccaaaattagttaacaaatttagggagcaaataaaactaattgatatgcgcgaatgttatgatatggataaaataattaagactgtgaacaatctcatttaattttcttactatagagtagttgatttggttctacttcttgtgtctttctatctttactaattgctacagaccctatactacctcttttctctctactttggatgtattctctatagtcctcatcaatctccatggctgcttgaagtattttgcttcttattgtgttagatgaattgataaacatccttgtatctttgggaagacagtgacctcctattccatccctaggttctagaacttctacattccattttgtattgagtgattcacgtaattcagaaaaattgatgctgttagacttgcaatagaggtaaagctcttctgcaaatgctatttgaagatatctatgagcattttctactatttttgttaattctgctacttcaactgacgatactggatgcattggaattgatagagtttttatcccagtggtttttgcccttgctactgttgttgagggaatagttacatgactattatttgtcggttgattcaaatggttatttgaattgatgctaacttttgtattattgttgtcaattaggggtgtttttgataattcagcctttgttgtttctgttgtctgtggtactacttcccgtccatcataaaagttaagaccgtgttgcaagcagcagttgctcacacctcctacaatacgtaattgattaacaccgtgaacctcttcttctaatgcataccatctatgtggtgcatgtacaacgtgtagtctatggtctactttttcaaatacttttttagatgtaccttttggtatagtgctttcaattgatattagtgcgcctgttttagcttctctagataacttttcaactacagacatcaaaccatctacttgtggtgtaaacatatcatctggtctatgtgtagatacacagataattagtacgtcaaaatcaccaaagttggatgcttgctttattccatagttggcttcagctgattgcatggttttttgatttatatcatatccataagtatcaaaaccatgttctttaacatattttgcaactggaagaccaagttggccaagtcctatgataactactttgttgtagttgtttttataattataattatacattcttttgatttcttctttcaactaccgtaaaagaatacataatgatttcttatgattctatcattctttaaatctattactttttactataataatttccactatgttttaaatcaaatgatgttaaaatttatccaagttaattgatagtcttgaatcgattaaatgtttgggatgaataaattcacattcgatcgtattttgggttcttcttttgatacttgcttttacgtgaacatacctgatgatatcgtggtaaaaaagttcataatttattctttctagactagtctcctcaaatttctcaattagggtacttgtaaaaaatatgtttatccttttggttatggcaattaaagctatttctctaatgaatcttctaacctcttgtctgatattcttattctgattgtaaagaaacaaggggatcacatcatcaaaaattacacaatctatctctaataccttgattcttttcaaaacaaggattagcttatctgaatcatagattctttgataagttatcttcttcaaaaaattttttagttccccatcgttggcatttgctatctttagaagatattcgttaattacttcgggccgaaaatttcctgatccatctaggtataatgtttttttacttcgtatgctatttaatgaacatatcaaatataccaggtggcttctgccagcaccttttttaccaaccaactcgataagtgtgccattttgggtcattctgagcaaaagaccatctaatttttttactcctgaatctatgagtttagatattctttcatgaataaaaatattgatttgttatgcatcgattcgtaaaggaagctttttattgtagcctagggtcttttcacaattgaataacaatatggcagcatcaccttcacaacaacctacgaagagaccattaaatgttttacagcgttctttgaacagaaaagttgctgtaaggttaaaaagcgaaatcgaatatagaggcaaaatgtcgaatgtagattcttatatgaatctgattttagttgacgcagaagaatttgatggatctgatctgttagcaaattacggtaaagtcgttataagaggtaataacgtgcttttcattaaattagagaaagaattctaataattagtacaatttctgaattcttgattaatgataataatgcaaccacgaaaatatatatttacatctgaaagtgtaacagaaggacatccagacaagatatgtgatagaatttctgactccattcttgattcatttctaactaatgatccaaatgctagagtagcagtcgaaaccatgacgactacaggggtagtcatagtagcaggggaggtaacttctacccataggatggatgtccaagatattgtaagaaatgaaataaacgatattggttataataaacctgaatacggatttgatggaaatacgtgttcggtcttagtttcacttcatgaacaaagcccagatatttccattggagttacatcaaatggattaaaagagcagggagcaggtgaccaaggactcatgtttgggtttgcgattaacgaaaccccagagtatatgcctttgcccattacactcgctcataatttatcattgcgtttatccgaagtaaggaagaaaaaagaattggattgggttagaccagacggcaaatcacaagtttcaattctatatgaggacaacaagccaaagtctattgatactattgtgttgtcaacccaacattctcctgaaatctctcaagaacaaattaatgaggaaattactaaatttgtgataaatcctgtttgctcaaattggattacttccgaaacaaaggtgtttgtcaatcccactggtagatttgttattgggggaccacctggcgatactggattgacaggaagaaaaatcattgctgatacctacggagggatgggaaggcatgggggaggagctttctcaggcaaagatccaactaaagtggatagatctgcatgctatatggccagatacatttctaaaaatatcgtggcagcagaattggctactaaatgtgaagttcaaattgcatatgctataggtgtagcaaaacccgtgtcaattatggttgatacttttaagacatcaaaagtagacgaagaaaaaatagaggctaaggttaaagaattatttgatactagtccagctggcatcattagaactctcgatctgaaaagaccaatttataaaaaaacctctgcatatggacattttggacgtagagatgttgactttagttgggaaaaaacagataaagcggaagctttgaaaagcattcatatcaattaaataatcataaattttcttttgatatgcttgcatggtaataaagtcgatgaaaggtcttgagcgaatctgacgagaaaatttctaatgatttgtctatcgcggaaagcgaacaggatcttcctcaagaagttaaagaaaaaaaattaaaaggccaacttaaaaccggttataccactgggacctcagctgctgctgcttccaaatcagctcttatcactctcttaacgggaaagagcgtcgaagttgtgcagattacattaccaaagggtaaaatagttacactcaaagttgcatggacaaaaatcaatgaaaagtcgattacctctgctgtgattaaggacggtggagatgatcctgatgtaactcatggtgctgaaatttgctctactgtagaaacaacaagtaataaaggtgaagttaaaatcattggagggactggggtgggtaaagtcactaaacccggccttggactgttattaggacaagctgcaataaatccaataccaaagaaaatgataatcgaagctatacaagaagtattaaatctttatcccgaggtaattaaaaagcaaggattgaaagtaacaatctcagttccaaatggggaagaaatagcaaagaaaactgacaatcccagactaggtatacttggagggatttcaattctaggcactactggcatagtactcccttattcaacggcttcttttgctgccgcaataagacagagtttggatgttggaatagctctaagcgcagatacttttattcttacgacaggaggcagaagtgaagatttttgtaaaagcttgttcggtgatacatacgatgatcattgttatgttcagatgggtgattttgcaggctatagtgtaaagcaatgccacgacaagagagttaagaaagtgtttattgctggattcattggaaaattaacaaaaatagcaatgggagtcaaacaaacccatgtaagaggatctcatgtcaatatggaatttatggctaaactagcagaagcagtcggtgcctctgaaaacgttctgaaactaattctagacgctaatactgcacggcatgtctcagaaataattgactctcaccatattaaggggttttatgatctcatatgtagtaacgccgctagccagctaaaaaattactcaaaaaacgagttatccatagatgttattatgttcgactttgacggatacgtcattggtagattcccaagtaattgacggcactagttctatgaactagcatattttagtatatatttggattcagcaggattagagcggtgataaattactgattcataatatttcatattttcacaacactaaatttctatcataaatcttcatattccctttggtccaaaagaggttatagacctgtattatcaaatcttaagatacaaacctataataaaatagtcattctaataaaatggtaaagtataggaggattattttaggaattgaatgagaatataaacaaaaaggatatcgctattgtcgctataactaagaaaggcattgaaatcgctaagaggattcggaatatgttgagcgaatcggaaatccatgtaccggaaaaatttagagacacggatccatctatcattttcttctcagaatcggtaacgaatagaatagaatcactttttcgtggatatacttcgctaatttgtatattttcattaggagcagttattcggctgatttcgccccatttgaaagacaagagaaatgatccggctgtaattgtaatagatgatactgcaaaatttgtcataagcacactgtctggacatctaggtggtgctaacgaattaacacttaaagtagctgagatcctaaattcaattccagtaattacaactgcagctgatgtaaacaaaaccattgccatcgatctattaggaaaaaaatttaattgggttattgataattatgaaaatgtaacaaaggtcagtgccatgatggtgaacgaagaaagaatcggagtgtatcaagatactggagaaaaggattggtggaatatggatcaactaccaaagaatgtcgaaatggtcacaatgattaccgatttgttatctaaagaatataagggctctataattattacggataagctagagtcaaataaatcactgactactaaatccgtaatatatagaccaaaatcactatatgtggggatcggattgcattggaatacctccaaggaaacaatcgagaagggcataataagagttcttgaagaaaatgagttgagtataaaaagcataatggcaattacgtccctcgataaaggcaaacgtgtagttggcttggatgatttttgcactgcaaatggtcttcctctccttctcttttcaaaaactgaattaaatgagatacatgtcccaaatccatctgatttggttggaagatatgaaggaacatcaagcgtttctgaggcctcttcattggcagcctcagagggtattttaatagtacctaaacaaaaatttccaccagatttgactgtcgctataagtagggtgaaatatcaatgaaaaaagcgttgttaataatagaccgaggaagcaaaatgaaggaagttcaggaagaattgcgaaatacttgtggctttattaaacataaaaccgactattcttacgttgattactgcttcctcgaagttattccacctgacattgatgaaggaattagaaaatgcattgatagaggcgtcgattccataactattgttccctacttcctatatcctggaatgaaacttaaagatgctgttacccgaactgcctcaattattcatcaagaaaaaaagaaaatggtaatatcaaaaccattgtcctatcaacccataatatctgaaatagtactaaagcgggtaaactcactgatagtcgaaaagggactcgataaggaaaaaacgaacttgtgtttattgttaataggccatggtagtagcgataaacgcgctagagaagcttttctgtatactgttaatagcttgaaaaaaatatatatgcaggttaaattttgtttcttggaattagaaccgccaaatattgacgaaggtgtaaaggaatgtttaacttctaacccaaatacgatagtggtagttccatactttttacataaagggatccatattcaaaaggacatcttggttgaattagctaatgcacaagaaaaatatagttttaacagtttgtttataactggacatataggagtggatcctgcagtaatagatctggtaatcacattagctaaggaggccgaaattaaaagtggagttttctgatactaaaatgggtgattatagtataggcaatccacaatctcgagacatgtcaacgagggcttttggaattgagaaacaaagttttgatataatagaatccgagatcgggaaccatggttatattgacaatgaatgggcggtggtaagacgcgttatccacgctacagctgactttgattttgcaaagaaagatagaattattttccatgaaaaagcaatagaatctgctttcttagctttttccaagaaatcttttgtcgtcaccgacgtggagatggtattgcatggaataaataagaaatcattattggatctaaatttaactggcatttgtctcataaatgatcctcaattaaaagaaatatcaaagaaatcaaacaaaacaagatctgagcttgcaatgcagaaggccgctgacaggataaatggtggtattgtagtaattggaaatgcgccaaccgctctttatgaattaatttcaatgatagaggaaaaaaaaactttaccattgctcataattggaatcccagttggatttgtgtcagctgttgaatctaaaattgatttgtcaaaaatggatgttccttatattacaaatataggaaggaagggtgggagttctgcggcctcatctattattaattcgctcatgttgttgtattcgacaaaaaaatctaaagctcaatctaagacacattgattatgttagttttaatttaaacccataaacctctaaatcgaaaattgttttacttgtcaatgtcattaagtatatttattttattttcttgaatacctaacacagcattctaaaaatctatctgagaaagttgaattgataaaatgtgtatgcatatatgatgctatgcagttatgagtatggaaaccgtctctcccatccattatgcctttccctttttttagatcataaatcaattctaaatccgtgttgttaaagactatatttgaataatgaaattcatgacctctgaccttgtgcatctttccaagataagtttgatcattatttaacgaggcctctgtgtatcctagggtaaccttattagtcataatggtatctgcatcaaataaacccaccattttgtgcttcttttttttgctcttatagcctgaaattgtctttgtcaagtacattaatcctccacattcggcataaatcggtatgttcctctgtgctaaatccaagattgacctgcgcatagtagaattgttttctagtttatctgcaattacttctggaaatccccctcctaatattatgcctgttgtatcttgtgagacacatgagtcatcaagaggactgaaaaactctatttttgcccttttgtgtaacatgtctaggttatcctggtagtaaaaattaaatgacttgtctaatgcaactaaaatctttacttttggaccaagcaattttttagattcttgatatctggattttctttttaccaagtccaatgaaaacttttcaatttttgatttatctagataatttattttcttacctatctgtataatcttttcaaaatccagatgttcagcaacaatcttggaattgtctatgatactatcctgtaatctggcgtttagctccatacgtggtatcaggcctagatgtctttcatgataaattaggctcttattattaaatatctttcctacaatcggtatcttaatttttgaatcaaatgcttcgacgatatatctcagatgtcgttcacttgcaatattatttaatatcactcctgaaatccttatcttgctatcaaatttaataaaccccaaggtgattgctgccaatgatctggctgcttttttagcatccacaattaagagaattggaaggcctaggattcttgatacatgtgcagtgcttgcaaaattgttccttccagacatcccgtcatacagccccatcacgccttccaaaactgtaaaatcagaatcaatagaattttctaaatatgattcttgtaatccctttattcccatcaaccatacatcaagatttcttgatttgcgttttgaaatcatgttgtgataagatggatcgatataatcgggtcctattttgaatggttgaaccttgtaccccctttttaaaagtccctcgattatagcagttgatatagttgtctttcccaccccgctagtaattcctgctataacaattccaggggttttcataataggactttgtcatagatcacttaaaaatattatttcaaccatattttttgggccatcgaacttgtatcaaaaaatacttctcctgggcgatgggtgaccttacgatagtcattaattatggccaagtccattactcacgagttaatcattttttttcttaaatatctgttatatgttaggccaaatctatgtgattcgtctcttatatgttgtaaaatccttaatgatttcttgtttcttgggattaggattggtgcggtagatgacggtgtatacacctcttcgttctctttagctaaggaaacgcagtcgatctcttctattcctatctttttcaatgttgcgactgccgtgtttaaatgacctttcccaccatcaattacaatcaaatcagggaatctatcagttcgtttgtcttctgaaacagtctggccgaaattatcagacgaatatcttcttcttataatctcttccatcatcaaaaagtcattttggtacgataccttttttatcttgaatttcctataccctttcttttctgggataccgttcatgaatcgggtacaagctcctacagcaaaatcatttccaaaatttgaaatatcaaaacaatctataatgtatggcaattttttcaatcttagtaatacctgtagttcatcaagagcaggttcatgattcttttcaatatatgtctttagattgttcagtatcaattgcataatattatacttgttcatttcattggactcatattgatgtttctttaaaaaagaatcggaatccataggaattattttaacttccatcccggtcatcttgtataggactttttgtaaatttgtttcttctccaatgcttttgttcagataaatgacatttggtacttttgcactagaatgatagtattggcaaatgaaattgtcaatggaattatcccctaacaattcaaactggtattttttcatatcattgataaccccattcttgctcattagtgtcattacatgcatatttttttgattctcatcattcagaaatccaatgtattcctcagatttgtaaccatctatagaattattttccattttttgatggtgtaataaattttggagtctggttagagtatctctgatgaaaatagctctttcataatctcggttatcagaagcaatcttcatttctgcctcaagtttttcataaaaataccctagggtttcattgtcttctaatattttttttaacgatactatattttctttgtattgctcttcgttaatcttattaatacatggcgcatcacagtttccgatatgatattctaaacattcttttttaggaagtttggtacagattctgatcttaaacatctttcttaatagaccgacagacaagtatcttgaactgcctttcacaaatggacctactacctctccttttgtacccgtaaattgtccgtttcggtttctccttgttactagtaaccttggatatgtttcatctgtaatttttagatatgtgtatctttgctgatctttaagttcaatattaaaaattggtctgtgttttttgattaaatttgattctaggagataggcttcaatttcgttgtctgtgataatgtaatctatgcttttgattttggttacaaggactcttgttttccaattatcatcctgcatattctgaatgttttttgaaaaataacttttgattcttttgtcgagatcctttgcttttccaatataaataatgttttccttatcatccttcatgatgtatacgccgggattatgcgggtaaggatatttgatatagttgatctcttttgttttcaatttaattctttttacctttgaaaaataaccatcatttatttaaagggaatgatgattctttcctcccaaaccacatatccatttacctgcttttctttacgaccaattctttctcttttaatgttcttatttttttctttagatactgtccggtgaaacttgaattgttctctgatatctcttctggagtcccagtggctacgatttgtcctcctttatttccaccctcaggacctaaatcaataatccagtcggcagaggcgatgatatcaaggttatgctcaattacaatgattgtatttcctagttctcttaatctaaataatatttttaataatttctttacatctgcaaaatgcagtcctgttgttggctcatctaaaatgtatatcgtattacctgaatccctttttgatagttcggttgctaattttatcctctgtgcctcccctcctgatagtgtggtagcaggttgacccagatgtaaatacccaagacctacttcatctaacaactttagcttgtttcgaattggggtattgtttttaaagaactctagtgcttcctccacagtcatgtttagaacatccgaaatgctttttcctttatatttgactgtcagagtttcgctattatatcgggatcctttacattggtcacaggtaatatatacatcaggcaagaattgcatttctatttttctgacaccggcaccgtcgcacatatcgcatctgccgccaggcacattaaatgaaaatcttcccatcttatagcctcgttcctttgataattgtgtctttgaaaataaatctctaatgaaggtaaaggcatttacgtaggtaacagcattagatcgtggtgttcgtccaattggagattgatctatccctataaccttgtcaatgttctctatcccgacaatcttatgatgttttccgaccctttctttagatttataaaaatgattagtcaaatggttaaataatatatcgtttacgagtgtagattttccagacccagaaacacctgtgactactgtaattacacctaagggaaaaatgggattaatatctttaaggttgttctcatttgcaccaaaaactttgataaatctgtctccaatatgtttgcgttgatgattttcgtttacaactgttcttccaattaaataatctgcagtcagggaatccttattttccaatatatcgtgtagttctccttgtgcaactatttgccctccgtgtatccccgcttttgggccaatatctataatccagtcagcacttttaattacttcctcgtcatgttctacaacaataacggtatttccgatctctctcaatttgaagagagtgtttatcagtaggttattgtctctctgatgtagtccaatagttggttcatccaaaacatataggacaccggtaagattagttccaatctgggtagctaatctgattctttgcgattctccgcctgaaagagtacctgcattcctattcaggttcaaataattcaaacccacatttgatagaaactttagtctgctattaatctcttttaatatttgttttgagattattagatcactattattgagagtaatgttactaaagaaatctatagtcttttctacaggaaggttacaaatgtccattatggattttccatctatccttacagagagtacctcttttcttaatctttgaccgctacattgttcacatggtttttcaatcataaattttctaatttcttcgcgctttgattctgaatcagtctcattgaatattctttgtagattggaaactacgccctcgaacttaccagagtattcccatgaactatcactcgatcttgaggtataattatatttaatctttgaatttgttccatttagtatgacgttaatctgctctccgctcattctatcgattggggtgtttagattaaatccaaatcttttacccacatcctttaacatagatgttctaaaacttgcaaaatgacctgctgaccatggcttaatcgcaccatctaaaatagttttggtcttgtcaggtattatcaagtcaacatcaaactctgtttcgacgcctaatccgtggcaacttgggcatgctccaaatggggaattgaaagagaaaaatctaggttccatttccccaatacttatgttacagagagggcatgaatttttttgggaaaataaatattccttgccctcaattaaaaccatgacgatgccaccgcctttatcaattgcattttgtactgcctcaaaaactctgtctttttcttccaatattttgttatttgatattctgtcgataacaatctcaattgaatgtcttaaatgtttctcctttgctgaaatgatatcaagtcgtttactatctgaaatatctattatttccttatcaactctgatccgagaataaccttgttcctgcagagattccaagatcttctcatatgtcccttttttttctctaataacaggagctaaaattaataacattccttcgtctattttacttttacttagatcaagaattgacctaactattgactctaaggattggtaggatatttctgttccgcatttaggacaatatggaataccaatttttgaaaacaacaatctaaggtaatcatagatttcagtaattgttcctacagtcgagcgaggattcttgttggtcgttttctgttggatggctattgctggtgaaagcccatctattacatctacatcaggtttatccatgatttgcaagaactgtcttgcatatgccgaaagcgattctacatatctcctctgtccctcagcaaaaatggtatcaaatgctagagtggatttcccagaaccggataaacctgtaattacaactaatttattctttggaatttctaagttgagattttttagattgtgttgttttgctcctttaattattattttattttccattttacattaactagatgtcagttttagcagaatttcatttacctttttgagattttgtctgtgttcaattgctttttcaaactccaattcctctgcaaatttgttcatctgagtctctattttggttgataactctattaaatcatttctagtcattgttttcaaattaacttccaagtttgagatatttgaattcttttgaggtatcggttttaagatacttttaggttcgatcttattttcaaagttaaattcgatttgcttttttcgccttctattagtttctattactgcttcccttatggatttggtcaccgaacctgaatacaaaattaccttgccatcaatattcctagcagcccttccgaatgtttgaataagactagtataatttcttaagaacccttccttgtcagcgtccaaaatagccacaagcgaaacttcaggcaagtctaacccttccctcaatagatttataccaactaatacatcaaactctcctatcctaagctgcctcagtaattcagttcgttccagcccattaatttctgaatggatatatcttacctttatcccgtttctagacagatagtctgccatgtcttcggccatcttctttgtcaatgtcgttactaatgttctctgcttcttagaaactctttctcgaatctggtggattagatctggaatctgaccttcagtcttttttatttctatttgtggatcgactagtcctgtgggtcttactaattgctcaataagattatcatggttattaatttcatactttccgggtgttgcggatacaaatattacattgttgagatatttttcaaactcttcaaactttagaggtcggttatcaaatgcactgggtaatcggaatccataatctatcaatgtttttttccttgaataatctcctttgtacattcccataatctggggtaaagttacgtgtgattcatctattactaacagaaaatctttatcaaaaaaatctaaaagacaataagccggttgacctctctttctgccatcaaaatgtctcgaataattctctattccactgcaatatcctaattccgatagcatttcgagatcataatttgtcctagacagtaatctttgcctttctagttcggtgggcaaattggggtaccattcttctaattctttctttattgataatagcgcccttttctgactactttcgtccacgatgtagtgtttggccggaaaaatgattatcgaatctagttcttttttaatctctctagtaattttatcaatcaccgtaattttttcaatattttgtccgaaaagattaatccttattatatcctcagaatatcctggaattatatctatgatatctcctctggtactgaaggacccgcttgtcaaatccaagtcatttctttcatatcttatttttattagattccgaatgatgcttcttctatccatctccatttccttcttaagcatgagagattgctctttccattcatggggtgaacctaatgaatagatacatgaaacagtggcaatgatgattgttggttcgcccgataataacatcgatgttgcttcaagacgcatttgttcgattttttcatttatttcggtatccttttctatgtaggtatcagtttgaggcaaataactttctggttggtaataatcataaaagctcacaaaatagccaacattattatttggaaaaaattctttaaactcagcatacagttgggccgacaatgttttgttgtgagatataactaaagtatttttattgtatttggctattacattggcaactgtatacgttttaccactgccagtaactccaaggagtatctgtctttttttatttgtttccattccatccattaaccctttaattgcggttggctgatctccactgggaactagattgtttgataattgaaaatttcccaagatcgattacctcatatgtaactgatagattatgtcactttccaaaagaaatctcttcaacaagtttatctagatctatatgttctatcagctagataatattttgcattatttatctaagaatattttgacaacgcatgaactggagaaattttagatcccttgtaagccggatacagacccgaaaaaatactcaaaacaataacgataatgccaattttcgatatttctattatattaaatacgggataaatatttagaggtagatttagaaaataaaggaagccacttagaagaacgtgtgaacctaaaaacccaaatacaattcctactattgccccaatgatccccaaaaatatagattccgtcaaaaacattccaagtatgactcgatttgttccacctaatgccttgattatcccgatttctctggttctctccactactgaggtataaatggtgataattatcccgatggatcccactatcagagaaaatatcgcaatacttgaaataaatgtgctaattccaatgatgaatttagtcaaacttttgagaatttcaagtgaattaagtatagttacttgattattaaagtacttttgaacatcttttacaatgttgtctactttatcaatattgtcatatgttaaaaataacaaatcgtaatcgtctgatttttccaggatttcttttcctttgtgtacgtcaatgaagatagagttgtctatgatcggatttccagtggaatttatgattccaaggactgcaaaagtactattaatgtccaaatttgatttgctgccagtaagttcctttaagttatttattgttaccttattattatctataaattggtctctgtctttgttttctacagcgttgttgatgattagacctgaggaatttaggaaaattttctcacttattttctgagggatgatgacatgattttgagatgttaagtttagaccattaaatcctttgtctaaatcagggattatattagtcaagttattaaagtctacagccaatacattcgatacttgggaataattttgataatttaacattgctacaccttgaaaagctggatttatcagttgaacaccggggatgtttttcaagtattgaatggcattattatcaaagggaatattttttccaactaaggtcatattttggtcgaaaagcacttgtagtttgttctgtatcccatctatactagatccttgtattttatctgtattcgatataactatttgattaggaagaattttcttaaaattttgttctacaaagtatattaagccttgagatagactattgagagaaactagtaatccgcaacccataatgatcattaggattgttagagcattccttgtttttctctccttaatggagctgtacgttaagaaaagaatctctttaaaatccatgtcgtctagtcatgaggagttgaactcttggttatataatgtttttaaatatgtattgaataccattttttaatttgggtcatactaaccaagttctttgtataaagaatatctcgattgagaccttgggcaacttgaaaagttatttgctatcagatggattcaaggtcaaagaactccttgccactcataagacaataaagtcccaaaatttaccagactacgacgcagtttttattcttggtgggccaatgtctgttaatgataattttgattacctccttgaagaaaagaaattaatccattcttccttcaatcttgggatcccgatttttggaatttgcctcggctcgcaactgatcgcttcaagctgtggaggaaaagtctacagaggaccaaaaaaagagatcggctggggcgaagtacgaataacaagtaaaggccaatcgactatatttgataaaatacttgggagtaaaatccgggtgtttcactggcatggtgatacatttaccttgcctagtgaagccgaaattttgtccgaatcagacttatatatccaggcatttaaatttagaaatgctattggaattcagtttcatttggaggtaacaaaaaatatgattcaaaattggattcgcaagtatcacaaagagttgaaaaatgaaaatttaagtaggtatggattggttaatgatatcgataggaacgtatcagagttagaaactatctcaaagatagtatataaaaattttaagtctatgattgaataaatgtacttccaaggtgttgttagcccgtgtaggattcactggaattttgtgcatatataacgttatattgatttttctgtcgaatagacaatcttattccaataagctagaaatattgaggaatataaacaatcattgaatcaaattcgatatggtttgattccatatctattttgcttcatatataatattaaacggtgtctgagtagcacgtctgaattttgtaaatcctgcctcgagagccaaattcctgatcctattctcacctgcctgtgctccaagcgcaattcctttatctgcaagggaattggggacgcaaattatagatgaggctgcgtaatatatccttcctaccatgttcaggttatcttctattttatcatttgccatgggttctactatcatacacgatccgttcggttttagagactgttttgcgaatttcaatgctcctagggggtctcccatgtcgtggagacaatcaaaaaaagtcaccaagtcgtagtcgttaccaatggattcgttagcagaaacttgagaaaattttacatttttgtctaccttttcgtttttggcattcgcagttgcagcctcaatagagggtaggtggttgtcaaatccaaagaattgagaattgggatattcttgtgccataatcgtcgtcgaaataccatacccgcaccctatgtctgcaactttcccccctttttttagtatttgttcgattccttcaatagaagggatccaagattgaactaggttgctcgcataattaggcttgaaaaattttgcagtaccttcataaaggtcgtgatggtggtcaccccatctcagtccttctccagtttgaaaaatttttacaaatttatcttcgtccttaaatatggatcttaaaatttggtaaccaccaagaaggtatgctggactattttcatctgccaagaccatcgcattctctgctgataagctaaattttttattttcaggatcataggctagatatcctgctgctgcctgacttgcaagccattctctgatataacgttctgccgtgttcgtattatgggctaactcatctgacgtcatcgatccaaattgactcagggccttataaagaccaagtctgtctcctaatattatcatcatggaccctaaactgctgcctaaatctccaattgccttaattacaaattcttcgagttttttgttatcaattgtagttgtgctgtttgaattcatatctatattcagcgactttgagatattaatttttacaggaaaataagatcattccctatttagaaatagcctttttttactatgtcctcctgcagttcctgaaacaaaattatcgtgatgttattatgaatacacatcaaattgatccgggaaaattgtgttgtagattcaacgagtattattactgtcctgcaagttagattattttcgaattgttttcaaaatatcccttaattcgatcctttcataaaagtctgctaccccaattaaatatgggtagagctgcagggatgccgactatgataaaaaaaattggttcattattaagtagtggttgcctgtggggatattacgatcataaaaataatatttttttagcagaaattgcaaatagacttgaggggccttcggagggatttgaaccctcctcaagcggtttccgtattctttaagaaactaagtgaattccacagccgcctatactgaccaggctatactacgaaggccacgaattgaatcaaaattttatattaattattaatatataattgttttaactctgcatatctaacaaaaatttgttatctaatcctgctgctgtacaaaacttatatttctatattcatccattaaagggatgagctgttctggcgaaatatactctcacagtaatactgatactgatcttattcaaatcacacctgctgccaaacaaaaattaaaaaaagccaaatatggagtttttaatcattcagccgtagaattatgccattggacaaaaaaatcattttcggatggtggctcatgttataagcacaaattttatggaatatctactcatagatgtatggaaatgactcctacagctctaaattgtgagaatcgatgcatttattgttggagaccaactgaattctacgacacgatggaaatgccggcccatttggttgatgatccagaaataattgttcagaaccttttagaggaacgacgaaaattaattgttggatattatgggaagacaggagttaatgtctctaaattggatgaatctctttttccagaacattatgcagtttctctttcaggtgaaccaactatgtatcccaaattgcctgagctaataaaatacttatcagggctgaaggccacaaagtctatatttttggtaactaatggccaagaacctgaaatgttgtataggctagccaacgaaaatgcattaccaactcaaatctacttgtccactaacgcgtcaaacaagaatatgttttataaaataaatggaccaaggcatagaaatgcatgggagagatggcttcaaagtcttagttttatgtcccaagttaacacccgcacagttttacgctttacattgattagaaatttcaacgataatcctacatttcttaaggattttgccgaattagttgaaaaaggaaatccacattttattgaattgaaatcatatatgcatattggaatgtctacaaacaggttggaagaattaaatatgttggagatggatgaagtaagggcgttttccagcggattaaaaacccaccttgaagactactctataatggatgaaagtatagtatctagaattgttgttttgcagaacaaatctcgatttatttcaagatggatagaatctcaccattagtaaaggcattgtgatcattttggtcttgggtttaaataccagttcagaaatttgtctaaagcaacccttctatgtgatattctattctttgttttcaaatccatttgaccgaacgttagatccgaattttccggtacgaaaatcggatcgaaaccccaacccccgtctgtaagttcgagagggatttcgccttttatctctccagtgaatgattcaattttatgaccatcatggaatgcaattatagatttgaaactcgcttttctgtttactttattagctagaaggtcgagaatacctacatttccaattgttttacttacatacgaagaataaacacccggaaaatcatttagggcttctatgaaaagaccgtcatcttcaacaaatatttctttttgattaatcgtgaatgcttgtaagactttattttctgctacttccaataaactatcggattgaatttctctcagttccatctttttaaatgtgacaataattggattctttctggttgaaaccaagttatttatttcattgtatttgttgatattgctacttgcaaaatccatatcgttatttaatgcgttgtttaatttgattttactgggctttttgtcctttcagttaacaaattatttaagataaaatattaaatttatatgctgttttgagataaatttagatgtttttgaacattgagaattttctactaatgttggcttggctgggtgggctcatcttggcaagctgggtactttcatacggtgcggaacatttgtctaccagatttggagccaagtttgtaggtagaaccttgctgagtgtcgcaaccacacttccagaaatagcaatagtcatttatgcagcatctgcaggtctctatgaagttgcgataggcgccggtcttggaagtaatattttgatgatgactctcggtctagctttaatgttactaattgcaactaccaggttatcaaaagcaccgctaaagagaattgatgttagcaccttcaaaattgataaattgttcctattggtttctgctttaataagtgcaattctattgcttgacggctataattttatagatggtttcatttttattggaatgtttgtagcctacgttttaatagcttttatagaaatgaagagagaacaaaagagcatcgaacccactgttgttaagaccgtggaagggaaatcagtttctgctccagttcatgtgttaactaataagaatgaaatgacaaaagctattttggcatttgcagcagggacccttggcattttggtcgctgctggtccattcattgattctcttcagactttttctgaagatattggagtatccactattgttttagcagtaataatcagtccgattgcaggagaaatgccagaaaaaatttctatgatgattttagccaggaagggggctgctggtgctgcaatcgctattgcaaatgttctcggatcaaaaatactcaataattctctcttactgggtgtggcaataatagctgccatgtatcatggcgggttctttactaccattcctaatagcgagatgttatggtttcagatgatgttagctacttcaatcactattgtggcgctgattccactgtttaggagatatattggcattcgtgttggagtatttctccttggactctacatacttagcatagtgatccaattttttgctcctgtagagatcaaacctcattaacttttttcataattaatttatctatgtattattttcaataattactaagtattatcaaaaatctagtaaaaaatccgatatgattactatataatttatgaattgttaaatttaatataaaaatattatgtgtaaattttaaaaacaaccccatactaatactttctaatgaattttactaaatatgcattagggatgttcgtttttgcaggaattatctctttaatcgccggtagcggtggaaattatttcacccaatctgtaaatgctcaacaatctataggtgatactataggaggagcaatagatgaaacaggtgaagcagtaagtaatgcaacagaaagtgcaggtcaagcagcaaataatacagtaagtgaaatgggacaagctggagataatgctacagagagcttaagcggtgcagcaaatgaaacaggtcaagcagcaaataatgcaacagaaagtgcaggtcaagcagcaaataatacagcaagcgaagctggacaagctgtagataatgcaacaagcggaaacagcacaaatgcaacagaatccaagaatccattggaaatgctaatgaatttgttcaagggaaatcagtaggaatctatccttatctctttttttatttttttttgatttgtaaaatattttataaaataaaataattggtattatattaacattaacatgaagtgaggattctttatcaatccaagaaataaattgaccactccgtgatggtacagattaagcctaggacctaatagaaagggccctttttcagataaatgctttagatttaatttagaatttaattttggtaagtggggtttgtgatatctgctttctacgaaataaaaaataaaaaaattgctctgaatatttgatcgaataagttatttattgtggtttatcacaccctatctaatggagctcgtttatgattatcctttatatcgtccaccatctgaatcacaatctttaatttttcaagttacattaggttgttcgttcaacaaatgctcattttgtaatatgtacagaactaaggagtattcggaaaggtcaattgacgaaatttaccaagaaattgatttgatggctaattattatccagacaccaagcggatcttcttggcagatggtgacgccctaaacttggaaacaaccaaattgattcatattctctcaaagatacgaaaaaaattcaacaacatagaaaggatatcaagttactcgatgcccaaaaatttattagaaaaatcacatactgagttgaaatccttgcaaaatgccggattagatatggtttatttaggcatcgagagtggcaataatactgtacttaaaaaagtaacaaagggtgcaacgtctacgatgatagttgatagttgtaaaaaggcaaaggacactggattcattctatcgtgtatgatcattttaggtctaggtggaaagaattattccaaggtgcatgcagaagatacatccaaaataataagcgagatagagccggattatattggagcattaactctttatatggaacctgaaatcgagcaggagttttatacaaagttcaaagagccttttctaccacttgacgaccttggtgtattagatgaattgaacagtttgatagacggcataaatgtgagtcgtgatgtgatttttagggcaaaccatgcttctaacgtatactctattggtggtacactccctaaggacaagtcagatattttacaaaaaatcggatatttaaaagggcatcccgaattactaaaaccaaaggtgttaagaagattctaaataatagagtgactctgagtaactcaagaaatattatattttaatacaataggtagcctccaaaataaaaaaatccaccgattaacttcgtgtgaaaaccgctgcaatttacctgtcagaaactttaattagaaaaatattgagtaaaacctattgtatctaagttgattgcatagcaagttcaattttattttcgaatagagtttgggagtggatgtgaatctcaatggctatatagagatattggtttcatttgctagttagaagctatttacattgattgtattaaaacagttttcctcaatttagaatcattttattatttcaaaatgtttccctgatgaacctttacatttgttcttatttagatcaattgggtcagttcgtcgcagggtcatcattgtgatactcagactggagcagctaattacttcatccccaaatacatcttttttctgatggtatttagacacctttattcgttttaattactttgctgaaagcaattcataggataatcaactctttgttaaaggaattaaaatttagcgaatcaaatccgaatccagtttttccattcttccttttacctatgcataaactatcctctattcttacgccgaatttattttccaagtatatgccaggctctatagttattgtcatattttcttggatgtgacttgttattttgggtcttatccaaggtgattcatggacctctaggccgatgccgtgaccagttgagtgaataaaatattctccaaacccttccttttgaattatttctctgcaggctgcatcaaccaatgcgaaattatcagtttccgataatcgtctaattccgttttcctgagcaacttttacaatgtcataaacatttttcatcttatttgaaattcttcctatcccaaaagttctggtcgcatcagaaacataatgatcataacttaaagtaatgtctattactatgaattcatttttcctaattatcctcctggatgtctcagcatgcggaaaagaagtttgtgatccacttgcaattattaatgggttagaggtaaattgataagaaggaaatttggcacccattttgagggcttcatatacaagtatggcctgaatttcttcctcagccatatttactttaatttccttggtagcaacttcaaaaagtttatcaattatattagaagcttttcttattttgtcaacttcctgtgcatcttttatttcccgtagtttttctaccgggttatagtcaactactagatcccttttgcctatttttttaccgagttctttgatgatgtgatgattattattactatagaaaacgaaataattttcatctaattgattaaataaagaattagttaaggttttgcctctttctgatgaaattacatcacaatccttggacattcttaaagcgcgtgagtactctaactttggaactattagttttgaataagtttcaaatatgactaaaatgccttcaccccaaaaacccgtaagatagaaaatatcttcgggcttatcaagaatcacggccaccttattagtattcttttgtttttctctctgagtatttatgagtttgattaatttctctagcctattatggtgctgattcaaatacctttccccatatgagaccaaaacaaatgaattacttataaataacgggtaggcttcctgtatttttgaaagttgccatggaatatctagtaatgttgccaggaccgaccaatgttcccaacagagtcatgaatgctatgttagctcctataattaatcatagaagtgaagattttagaatactgtatagatcgataatagaaaaaactcaaaagctatttcagactcaaggtgacatagtattattatcttcctctggtaccggtgcagtagaagcatcagtagtaaacctaataaaaaaagatgataaggtagtaattcctgtaaacggtgaatttagcacaagattagcggatttgattgatagctggggagggaaatctattagaatcgaatcgccatatggtgagaaccctccattcgaaaaattcgaagaagtttttgacaaacataaggatatcaaagcgttgtatgcagtttacaatgaaacttcaacaggaacgacaattaggtatatggacaagttaggtgacctgtgttccagaaatgattgtttctttatcgcagattctgtatctatattaggtggtgatgagttgcccgtagataagtggaatatcgatttatgtctcactgcttctcaaaaggctatagctgctcctccgggagtttccccgatttccataagttcaagggctaaaaagtacatccaagaaaattctgcacctattctctattttaacctcaagagatattttaaatattatcaggaacattatgaaacaccttttactcctgcattacccttatgttatgcttatgatgaagcccttaatctaatatttgaggaggggttagcaaataggattgaccgacacagaaggtgtgcggaggccttctacgaaggtttgggagcgatgggattgactccttacgcgaaactcgatgcacggagtaacgtcgttattgctgttaattatttgcctggaatagacgataagaaatttagagatatcttgtctaatgattttaagatcctagtcgcaggagggtttggaaacctcaaaggtaaagtttttagaatcggatcaatgggggaagttaacaaatatcatgtcgtcaggacattgtctgccatagagtctgcattgagaatgatgaacatcgatgtgccatctggtgcaatcaataaagccattgcaaaattataaaaccctaatttttgttttattgtcaaacttaatatagggaaaattaacagcgaattttatgacattggaaaaaggttctcttattctacttgattatactgctaagattaaagatactaatgagatttttgagacaactagagcggatgatgttaaaaataaccccgactatgatccaaataagaaatatgaaccgcgtttattgggtgtgggagaaggctgggtactaaaaggcttggacgaagccttactagagtcaagtaccgatacaccgctaaatattgaaattccgcctgaaaaggcatttggtgaacgagatccttctaaagtccggatgatcccgttacggaaactaggcgaaaaagcaaatgaagtaagtataggagatgtaatagaattagatgatcgaattggaatcatccgttttattggatctggacgagttcaagttgattttaaccacaaatatgcaggaaggacccttgtatattctgccaatattgtaaaaaaactggatgatgacaatgaaaaaatttcaaacctgattaggcgacggttgcctatagatttagcggaagttaaatatgtaaataaagaatctgatctagaaatatctcttcctgaaaatacattcttgatagagggtattcaaattatcaaaaggggaatatccacagatattttcaaatttattccatccctgaaaacgatagtatttttggaaaagtacactaattctgtttcaaccgcggagaaaccctcagaagcggaaaatactgatgctggtgtagacaatgatactggtaatgaggatgctgatacggataagaaagaaaatacagagatcgatgacaaatccgcagaggtcggtcctaaatctaaaaaggaaaaatcctaactttattattgtcattaatacgcgatatagaaatttttttaatctaaaatccctatttcatctagaatgtcttgatattttgacggaccataatcaagcctattcaagatggtgtacctttcaggccggattttctttgcaagcaataatgcttctactaattgatctttatcaacatttattcccttagaggtcgtgggagcaccaattctttttagtgcatctttaatttctaaccaatctaaattatgtaatttggccattatgatagttccaatccccaccctttcaccatgtaatccgcacttattttcggttatgtattctagtgcatggctaaagaggtgctctgaccctgagcacggcctgctacttccagctatacctgccgctactccagaacttattaatccttcaactatagtccttgttaattgaacggtaatttcatttttgataattttctttgaaatatctataaccattctaaatcctagatgggccagctttgctgcatattcgccatagtactcgttattataatctcttgctagttcccaatccttgatagcagttgtctttgcaatcaaatctccgcatccactggcgattagcctatagggggcgtttgaaataatgtctaaatctcctataatctctacaggtgtatctgcctttatagaatagggtctatcatttcccttaagcgagacaaaaggactagatattccatcatgtgatgctgatgtggggatactgacaaacgagactctcagcctcgtcgctaccatttttcctagatctatacatctacctcctcccaggcctataatgatggagatgttcctatcatttagtagattcgtaatcgagtcgacttgttggaatgatgcttcttttgcaattatccattcaaattggagattactttcagctaaactctcttctataatccctgctgttttatttttaacatttttaccagttatgatcgcaattttattaatattttggtcactatttttgatgaactctcctgaattccttaaaatattgttccctattattaccttcctaggtaactgcattacatgagtcaagcggtaactcatttaatcataaataattgagaaaatttgtgaaaaaaactagaaaagttttttaaggttattcttcaggtttagcttctaccaaatctgctgtagcataacctcttcctactcgagtaatcttaactttgactttgtctcctactttcgtattcggaacgaaaattactaatccttgaatccttcctacacctgcatcccctcttttactcatagattctatatctatctcgtgttcttctcctgcatttactggagatggcttaaaaaatctattgtagctaccgcctccattgccattactgcctccattgctattactcctattattggggtatcttctttgaccattgtcaccttgtgaaatttgttctattcctgatggttgtgattcactgttttccaaactatatcagtacactactataatattattggatatttcaactttgatattatgagatcatagaaataggtaaattatgttaaaatacttttttatttattaaaatactgtatgcaaacctcattgcaagttgaagggttgatcaaggagttcatggatgtgagaaatacgaccttggaattattttctcctctggaaattgaggatgcagtgatgcagtcgagtgattttggaagcccgcctaattggcacatagcacacgtgacatggttttttcacaagatattagaaaaatattctaatatctataacaggtatgatgacgattttaacctctcatatttgaattcttattatcaaaaatacgggtcaattctcaagaaaagtgacagagggagatatccaagacccaccgtaatgcaaactatcaagtacaggaaggaaattgagaaactatttgtagactttataaaattaagaaccaatgacccaaaagactattcagatgaattaatattagacatctatacggcaattaatcacgaaagacagcatcaggagctgatgatttatgattttcaatactattataatcgatttcctgacgattctgacaactatgttccaagaaaggttaatacccctcttgtcgtggaacaggttccaaaagaaatgatacatattgatggcggtttatttttgcttggctataaaggtaaagagttttgttacgataatgagttaccagaaaaccaagtttatttgaataagtacaagattgataataaattagttacaaaccaggaattcctggaatttgttgaagcaggcggatatcaaaattaccgatattggttagcggatggctgggatatggtattgtctgaaaattggaactcaccgctttattggatgtttaacaaagacgataaaaaatggaaaaaaaaggattttcgaggtattcaggaaattagaatggatgaaccagttgtaaatttgagctattatgaagctgatgctttttgtaaatgggccaaaaagaggttgccaactgaggccgaatgggaaaaagctgcttcatgggatagcaattctaattccaaaacaatttatccttggggtaatactcaaatgactaatgaaaacgccaatcttctagattctcatttatggcatcctgttgaagccggttgctacccaaaaggcaagagtcactacgggtgctatcaaatgatcggcgatgtttgggaatggacttcgtctgaatatgtgttatatcccggttttcaatccagatttgaggaatatactgacaaatgggcaattaatcaaaaggtacttcgtggagggagctttgctactccaaaagaacaaatacgtagtagctacagaaactatttcaaacctcatgatcggatactcttttcaggttttagatgtgcagctgacgcataaattttcaattgagaaaagtgggtcaggttgtcaatctgaattttttaattctactttctttaaaatagaaaaatcttggccttctaatcctatcatcaaggagtagtttcctgggggaatatgttgcgttcctcccagggtgacatctatcttccctaggtgcgttgtttcattttctatcaattcttgggagtcaatttcaataatttcaggattaaaagaaacctgcatacccattaagtctccattaggtacaaatgtccctgagattattggcttaaagaagatcgtgccattgttggtgaaagcttgcatgtgtttctggaagtcaaaacctggatcacttttgttaacggatatctctatactttcaatactattgttaccattacgcaggcttattactttaggattaacggacagagatatggggataactttatctaaattaataaaacctatcttattttccgattgttctgtaaaccagacacctgatccaatgcccgacgaattattggatgactctgtcgatacgtcaaattgcagtacgttagagtagccgcattgattgctaccattgataggatcgcatacagaataatgaatattttgtgttggtatccaatactcaatcaatgtatcattgtctggggcaaatctcgcaattttgtttccaacatgttcgttagtccaaatcgaattatctttggtagtctttatccaatagggtaaggtatttttgtatagatttacagatttgtttgagatgtcgttataatcaattccaacaattctagatgaaagtggtgatgttacaacatgttctatattcagacttgttgggttattagagttccctggaggagatattttgtaaaaagagctagtagcatggtctgttatccagactttaccgtgcgaatccactgctatacccgttggagatttaatgtttgtaggtaattcaaagatatcaaatttattatctgctatactgtacctgattaagacaccttttttttcaaacgctagagctgttatccaaatttttttgtttactttatcaattgccaacgatcccagccctacttcgtaatttggaatagattgaaatacattctttagcggaattggtatttctttgagaccttctgaggttccatttatcatcttatctatttgaccatgccacaaagagagagatcttattcctacaaaatacatgctattattattttcaaatcccattgatatcggatatgaggtagaaaaaaaatctgaatgaaaaggaatggggtaattataaaatttcttttctattttatcaaacttccataacgaatttaatttttcatccgtgaaccagaggctattcaacgtattatctagttttatgtcccaactccaagaattacccgcaggaaggtctcttgagtaccagaaaggtattctgtaggactcaaatatctgtttagacggatcaaatccaaataaggttccattcctggtggagatgaaccataccttgttctctgcattatcaaaagtaatagctatggggatactacatatctccggtaccttaaattctgttacaaaataattggaatttggtgcactttccatcccacaattccacttttcatattccaaaatttgattggtcgtttgttgtttgattgtagacgccaatacgttcggataactaataatcaatgataaaccaaaaattgacaataggataattgaaaggattacaacaaccatctttttcagcataatatcgtaccctatacttgggatctgagacataagatttcgtcatatatattttctacaatgtttattaatttgtttgtgtgttctggagtaatttctcagtttggaatcctctatattgctaggactctcgggtagccaggggatagtttcagtcatataaacggagtttgatatgtgatccttgagtctataattattagaaatattctttagtgaattatttgcctgtccaaaatatctggagttagcataacttatattttggattcaaggattgcctgcatatggcaaaaggttccagacgagggggcagggttcgtgataaatggagagataaacaatggattatagtaaatgctccgcccgcatttgacagagtccctctaaattatatcccaatttccgatgttagtaatgcaaaaggaagggtaattgaaaatacattgtatgatgtgctcaaacaagatccaacccaacatcaaaccaagatttttgttcagattgataggattaattctggaatggcttcaacaatatttaaaggacatgaatatgcaaaagagtttctgcgaagcctcatccgacgaggcagctctatgataaattatgttgacgaatacacaacagctgatggttatgtttttagggtgtctgctacagcttttagtcagagaagaataaattcagcaaagaaacatgaaattagactttctatggctaaattactggctgaaaagattcctatactctctcttgatgagtttgtaaaagaagtgactatgggaaaaatgagttctgaaatgatggatgttgcaaagaaaatagctattatccgtcatgtgggtgtaaagaaaactaggcttctttcctctcctctaggggtcaatgaggaaaaaaccgatgcggatgggtctaataaagaagctaattctgaagtttctacagaagctaattctgaagtttctacagaagctaattctgaagtttctacagaagctaattctgaagtttctacagaagctaattctgaagtttctacagaagctaattctgaagtttctacagaagctaattctgaagtttctacagaagctaattctgaagtttctacagaaaaagaggttgcaacttctttcaaagaagaaatagacaaagaagtaggcacttagtatttcttaatttttgaattgttttcatccgtagatatctctattttagttcatgcaacggaggatgaaaacaaaatattgaatcatattttggaaaattttagactctctaccaatatggtgacaattgattatgtaaaaactgaaggccattggaagaatccaataatgcgtttaaccatatcaacatcatccagtattgatcgtctctatacgtacctctgcaatcagttaagaattaactatggatctgaggaacttgatcaatatttgaaaaacaaccttgatgaaaaaggctcggtatatattcgtctagataagcaaaaactttgtgcaaggactcttttactttctgatacagatgccgttagactgattttcaaaaagaaaggaaaatttgaaaaatagattgattactgttggctaaaaatagatatattatagacctttcagttggtttttcttttccccaagggacaatatcgttcatcaaaaaattcttttccctagatgtaatgggaatttatgacaccagctcattggctataaaaaaggactctctagtgttgaggatagaaaataccaaacaaggtatcactaccattaaaaagaactatatttatctttattatcaagattttcttggaaatctggataatacatatggcaacactgatatcttgacaataaatgatttttttaatcctaagaatcttttaaggaaattatcaggcaagaatattggattcgaatttttggtctcaaaactaagatacttagatacatcacaggtaggtagatggttttcttttatgaaatatttttatagtctctgtaaaagatatggacatcaatttatactatccagtggtgctaagaatatctatgagctattttcttcgcgaatgatcaattctattcttgataaattggaagtttcttctaccgaatattggtctgatctaaaccagtggttgccgcgtaaaaagaggggtatgatttatgaccctctctaaaaaaaaatatcgttatattggtatttatctatccagtcggttatctttaaataaatctgcgatcctagaagaaatttctggaagatatttgggattatttggatcaattgattatagtaaagccaacatcagaattatcaatattaataatattcctgatacaattatcatattaaaatgccgattggaatctttgactaatacattgatatctctgagccttattgatttggaattgatgattatctctatatcaggtacgctaaagcaactcaagaaaaaaatactagcattcttgggttatatttctgagaatcaaaaagatctgacgtttaacttcaaagatagctaagtataaagatgtcagtaagcaactatatacaattcgagacataatgttcaaattaacttcaacgaaatcaacattggaagaaaaaaaagaactgcttaacgatggtaccaaagatacaagggatagggaaaaaactaaggcagtagcgttattatcgggaggtctagacagccacttggcagttaggatgatgaaggaacaaggtattgaggtagaggcagttgcaattaagacaccattctgcgattttgattgtgggaaggggtgtggacacagggtcctagaagttgcttctgaacttgacataaagttaaaaactgtttacttaggaaaggaatatctcaacatgttaaagaatcctaaacacggatatggttcagggatgaatccttgcatcgactgtaggatgatgatgtacgatgaagctaagaaacatatggacgaaattggagccgattttatcattaccggtgaagtcctacatcagagaccgatgagtcaaaattcaaacgctctgtctatcattgaaaaaggcaccgaaatggaaggcaaggtacttagaccattatccgcacgattgctgccattaacaaatccggaaaataatggattgataaatcgttcaatgctcggagccatacgaggacgttccagaaagggccaactagatttagccgataaatatggaatagcaaatccgcctaattctgctggtggatgtcttttaaccgatcctcaattttcaaaaagagttagggatcttttcaaattttcaattcaagagccaagtatcaatgatgtagaactcttgaaaatagggaggcactttagattgaactccttctcaaaactaattgtagggcgcaaccatgctgagaatgagatgattaaatccttgtgcaatgataccgattatttagtacagccaatgacagtcccaggtccaacatctatattgaggctaaatgttaatccagatttacgaaagcataagaatctattagaattatccatacaaattaccttgcgttactctgatacagaggcggaatataaatacgaagtttcagtggctaatagaagacagaaattggttaggaaaatttcgtccctgccatgtacaaaaaatataatagaagattacagaatttgaatatgctgttatatttagtctttagtatctttcaatcttcatattaatcaagcaggttatacaccaattatatatctgataatatgcaaacaaagaaaattggggaaaggcctatctatttaaagacttttacacttcgtaatccaaaggatattattgaaattaaaaaagatatcgaaaaaaatatgataattattatcagaataacaccgttggcacagagagatgttggagaactgaaagtagtagtggaagatctttataaatccgttaccatcttagggggagatattgcgagattgggtgaagaacgtattataataacgcctcctgaagtaaaaatatggcagagcaatcaagaaacaccataatccaaatatctatgagtttgttacattacaatagttttatggcttcttgattttgcaagtactgtgttgaaatgttatggactttgctagaataaccagaaaagttttggactttggatttctcaccgtgatttaccaatatttttctaagctttggtctaagtctagaaatatatgcatttagttgattaaaatcagaatgcgaattaaatgagtacattgtttcaatagcgcactttatctcaaagtcctcgtcgtttaacgaaaaccttctttgcccttctataatctctttccctaaagtcataccagttggtttatttgtaaaaattattagattcccaggatcagctgagaccttttttaggtaatccttggagtatttgcaatttaacattgaagaaggataaatgatgatgcctggatccaattcttgcgtatttatatcggaaattgaagttatatttcttgagcggaagggattataatcatttgagattatggattgttgtaactctcgatttaagaattccaagttaaattcgtgtatagaattaatttcggttatcaacttatcaatatataatttgcatttcattatttttttttgtttaataagcatatccaacgtaattaataattcttgagacgttccaattaactgagacggcatcaaaaccaatttttgattccctatcaccttattgatctcttctattaatctttcttgcgcatcttctcgagacaaatatgagtcttctcttccaccattagttccttcaattaggagtgtttctaccctggggaaattccacactgcattttccaaatatgaactttttccaaattttatatctccagtataaacaaaattgtgatccccatttcccaaatggatatgaaacgacgatgagccaataatatgtcctgcattgtaaaatgtgactttaatatccggggcaacatcggtaacgatattataattaagatgaattagatgtgaaaaaatcttttcaaattccttgtccgtataatgtgaatcagatccgtagtgtttcacatattctctatacaggacatacattaggtatgaagtgggttctgtacaataaacaggaccatcgtaaccgtacttgaataacatcggtaaaaatccagtatggtcaaaatgggcatgtgttaacaaaacagcatcaattccagaaagcttgattccggtagagtcaaatcgtggaaaccttgacaaaggatctttagtatatatgttcataccacagtccaacaaaacgttactttcattggtgcttaatatcattgacgatctgccaatttccgcaaatccccccaaggagtttaaatttgcctcaatattcggatccaacttttcccgaaatattttttcacctattctcttataaaactgaatgcgatagtctgaagcattcctaataatcttgttaatattcttgattgcgaccatgctttttggggcctttttaaatgatattttccaacctgattctaggatgatattatttatgatcttttcatcctttattatttcagatatttttcttacaaatatggtggcttctcccaatgcgggatcaaacaatatatccgttattcctgattcctgaggaatatgcttttctgctatcttttgaacttctctctcgtcaattctgattgcttcatctatcctccatacaattcgtttttttatttgacccactatattagacagaattttgttattctcgagcaaaaattgaggtttgtttgtgtgaagtgctattctaggaccttcatattcaattttggtcagagaacattctttaggtagattctgtaatattgttgccattaccgattgactatcttgtaagttctggctcgattcaaaggacctcgagtacatttgaatcacagtttttgattaaaatcaaatagtaaaacaattaacaaggaacttttgaatataaaaacctatttctttattttcctattgatgtttaacatatttataagatgattaccaatatctatcagtccaaactatggcagattattttgacaatttggttttttcatcatcaattattatatttgttgccgctctgatttgtatatttgcttatgagtttatctttaggagtaaaggcaatattattgaaaaatctagaatgatacaaaaaataaataaaaagggttctaaacttaaacaaaaccaacagcctgatagagttgaaaagtagttacgctcaattagaacaacatatattaaataaattttcaaaagaatcctttgcaaaattaacttcaatccaggaccaatcatatagagttttagcacgaaggcaagattctctattggtagctccaacgggttcaggaaaaactgaatctgctataatacctgtaattactatgttggctgaggacaaatgtggggcatccatggatggtgaaggtataaggtgcttgtatattacaccgcaacgctcactcaataacgatgtttttagaagaatcataaagtatgcaacttctgaaaatctaaaagtcgaaattaggcatggtgacacatcatacaccaagcgtaaaaaaatttatcaaaatccacctgatatactgataacaactccggaatccttgtcaattatattagtaaatgaaaagatgggtcatttattgaaaacggtaagatggattatcattgatgaaatccacgagatcatctcgtccaaacgaggatcttacctatcattatgtctggaacgtctgacttttttttctagtggcttttgtagaattggtatatcagctacagttgggaatcatgctgaaacagctcgttttttggtgggaaaagataaaaaatgttcgatattagtggacaaaactcttagaaaatatgatattgaacttaagcatatagatggatcaattaaagaagtttccacatatatcttagactatttatctaaaactcattcaaactcttctgttttgttatttaccaacactcgggatgaatctgaatttatgggtaccgtattgaaaaatcaatgtaatttacaggttcaaatacatcatggttctctatcaagagatgctcgagaagaaactgaaaaatttttgagaactggtatcgctggaattgtagtgtgtacgtcttcccttgaattgggtttagatatcggatcaatcgatcttgtaatacattacggatctccaagacaggtatcaaaattaatacaaaggattggacgtagtaggcatactcggagattatcggctaagggcttgataattacaaataactatgatgattttttagaatcgctgagcataatccaaagagttaggagaggatccattgaagatcagattccacatgagtgcccgcttgatgtgttggcacataatattgtcgggatgacattacaaaccagagaaaagctgaatttggaaaaattatatgggtccttttcctctgcttacttgttcagatctttatcgtatttcgatttcatggattgcataaatatactcctaaatagttttctaatccggttggatgtggaaaaaaaacatattacaagaacgggaaagtcttataggtattattatgaaaatgtttccacaatacctcatattgttaaattcgatgtaattgattcgatatcaaaaaagagaattggtacattggatcaacaatttgtgggagattacggtgaaaaaggtaatgtgtttgtgctcaggggctcacagtggagaatattagtaatagatgagggaaaatttcaagttcacgttgaaccgctaagcggtgctccaattaatgttccatattgggtaggggagatgattccagttgactatgaaactgcgatgatggtaggcgaattaagaaaaaaaattaggtcagggaattccaaaaaaattgatattagtttctctgatacagatccaaaaataatagctaatatgtccaggaatatgaaatctttggatgtaattccggattcttcaaatctagtctttgagacgatacctacagaaagtattgtagtagtccacagtacccttggctcaaaaatcaataacaccttaggctcattattgtctacatttctttcatcaaagacgggttacataattgaaactagatcagatccatatagaatattactaagctctgtaaatattagattaagacagaatcatattttctctttatttgatgatgaatttgatgtggaatcagtactaatagcatcttttagtgggacatataacattaattggaaagtgtggggtatagcaaagcgatttggaattataaaaaaagagtctatttacgacaagagggtggcacgcatgctttacgatagatattataagacttctcttagcaaggaatcaattagagaattagtccatgataagtatgatgtaaaaaagacatcgcagataatcaaggatataaaatctggagccatcaatttgcactggttagacactcatgaattttcgggactcgcacaacctattttgtcacgttctaaaaaatcaatttctgccccacttggcttagaaaaggggatattagaattggtaaaagaacgcttgacaacaacaaagcataagttagtttgtatgagatgtggtaaatgggaaaggatatttgaaactaaggatataccaaacaaattgggttgtccattctgcaaatccaaattagttgcggctactttttggaaggatggcgatctgggtaatatcattggtaggaaaattactggggccaggctttcaaaagatgaagaacataaatttgataaggcctggaaaatagcttctttaataaataattttggaaaaatggctgtttttgtgttatcgggtcatggaattggagctgatacttgtgccaggattttgcgtaactataccgatgatgagaacttgttgaaaacaatctatgaagctgaaaaacaatatgtaatgacgagaggattttgggacaactgatgaatcttgtctttttctagaatctttatgtaattatgattcaacctgaccatcttaacttattttgataatatttgaataaggcttaagtgataactcaatatttccttctttgccacttgctgcgtttactcctaaaattcttactctttcacctatcttaagatcaattactaggccgctactctctctccaacccactagtctcatttctcctgtgtcatcacccactatagtgtctgctactgacacgatttccccacttttagtgtttacatccattttatttggattctgaagaactatgacctcgaccacatatggcttgttcatgctatctacttccattattttgctttcaaactggtcgcttttggggatatctctgtcctccctcaagaatctgtacgtacgattcttgaccagttatttcgattgtatttccaagaaccctactagggtaacattcaattatatcatcagtttcaaaatgaatatcaaatagtttattatctattgataataaatatgacttgccatctttatctatcgccatacaatgcgttttcctttctgttggatcgagcctagcagagacgatcctcaatgtatagctctctacaggttctatttgttccacaaattcaaatccagtgccctcgtcaccatgtatttctaaatcaccgttactaaaattagggttacctatttttgtcttgacaccgatcaatttaatttttgaaccagttgtcaaagattttggtaccttctcatcatttatattccaaatgattgatcgaattttcctggtgttgctatcatttgataactccatgtgtagggattttgcacgttctcctctactattggtgaatgcagaaatcctcggatctgaagtaattcttccagaaataaccatattttcctttggaacatcaagatcatcaatcgtttcagttaattcagagagtaacggaatttgatatttatcattttctgaaactatttcaattgatccgttgctgctcaagttgataatgggcttattgtccatccctgctttgacctgtccctttgaaactttaatcaaatctccaagctttaaatcaagctgttcaggcaaatctacaaaatcatcccaaagctttattttgacatttgagtctttatcataaatatggataattctattccttgattccaggtttgaatccctctttaaaaatattttgatcggattaatagtcatgattctgccgacagtagttacatccctggcgccaacaaatacatctttaagactatattctgattttggagttttttccaaggaaatacctaaatctgcggccactaggaataatgctccctggtctgtcaaataccctgcacccacattggtctttttatcttcaatcattgtctttaatttctcaaaatttaaatcgtgtttttcttccaatattatttcaatcattttattatagtctagtgccaattatgatgatctaatttacattacatattttaatttaaaaaaattttcgtagaatgttaacttatatacatataatttttatccaatattcacgtttcaagtgaaattgttaaccatttacttagctagtcataggaaaattaattaagaataccattagaatgatgattcctaatggatttgttataataaagttgactatttattaaatcgcaagaggatattacatagctagcagtttttgatcggcaaaataattttagatatacatgtagaatgggttcttagattcctacaattattttttagcacacatttccaaaagaaaacctatatcagattgataggtaatgtttatggatttgatgcagtagattttcagtcatatgcttgagcaaacgaaatagttatacttcaagcatagggatatctttgatttttcaactgtcgcagcttctaactcaattttttaaggtttataatggttttatatttgaactctatctactaccaaagtatgcaatttaccccttgtttctatttactcgattttaccctcctcctgcgatacgtgaaataaacaacagcaataattattccgagtatgaatgaaataatgggtatcaggaaaaaaggactctgatcatcaccttggatatcattagatttagaaatctctaatccggactgattttgactggtcatgttattaggttccgtaccgatgattttgattactctagcatcttttccaaattctattaccaattttctgttatcgttatctaaagtgtattccccagatgatgtattgctccctacactggaggatgatatatttgaatcaattttatcaataatttccttatattttcctggttggttatttacaagtactgtaaagttcttatcttcttcgcctatcctcgaatctattatgttccggggcagatcaattgatagctcaccgttttcgtcataagataaaatatcaagatttagggtcttgatttttggatttgattctaattggagaccatttaggcttccgccttttagctcgacgtttgtgtaatcaattttactattaactgttatgggaataatttgttgtaatattttgtctaatccggactgattttgactggtcatgttattaggttccgtaccgatgattttgattactctagcatcttttccaaattctattaccaattttctgttatcgttatctaaagtgtattccccagatgatgtattgctccctacactggaggatgatatatttgaatcaattttatcaataatttccttatattttcctggttggttatttacaagtactgtaaagttcttatcttcttcgcctatcctcgaatctattatgttccggggcagatcaatttttataatatctgacttattttgacctggagtcaatacaagaattatgctcctttgatcattatcataaagtatgttattaattctatctcctgcactagagattgagattggattaagaatgctacctgttttgacttgataatagatatcttttttgaaaaatggatgatcaggctgatctccatttgtggatgtgttttcaaagatttcgtcttgaatcttaggagcacccatagtagtggtattttcattattcaaactagataacgcatctctaaaatcaaagtcggtggtactaaatattactacaaacgttgacatcgtgagtaggtatactccaatcaacaccgaacttccatacttccacaatagtttagtatagattcgatcatatgatataagaattctgcgtggactattactttaacagtcaaaatgtgcccttcgatgtagctattattgataacggtgtgatctatgggggataatttttcaaatagactattatgaaatggatatttaacaacattgaaatttcattccctataccgatatacaattggttttcgggattattttgccatcttctgagtatcctgatggaatattatatatattcgattacagctttattcgatacttgacatttattttgttattacgtgattcagcaattggtatgggggatttgtgtattgtcagctgagaagaaagagataagaatagttgatcatatataccaacctaaacatgaaattctaacaaaggatgaagctgaaattgtatttaagaaatttaattctaaacccagtcaattcccatatatgatgtcttctgataaaggcattcaagggttagaagctcaacctggggatgttattaaaattacccgaaagagttctactgcaggtgaaagtgtatattaccgatatgtagtagaaggttgatctagggaatgacagtcagtatcagtaataattctatagatatgtggcctataatcaatgatattttgcgacgagagggagtagcaagacaacatcttaattcttacaatgagttcattgaacgtggactccaaagcataattgacgaagttaacgagatagaaattgaaacggccgaatatccatataaaattaaattgggaaaaataaaaatgcagcaacctaggatcatggagttagatggatcaattactcacgtggcaccagtcgaagctcgacttcgcaatttaacttacgcctctccaatcatgttggaatgcagcatagttgaagagggcaaaactttggaatccagatttatacatattggtgatatgcctgtaatggtgaagtcaaacgcttgtatgcttcataattattctgaatcaaaattagtcgatgtaggggaagacccaaaggatccaggtggatatttcataataaacgggtcagaaagggtaattgttggattggaggatctttcttataataagattatcgttgatatcgaggaaacatcgggtaccatgttatacaaggctaaagtatattcttcaattgttggatatcgtgcaaaattggagttgattatgaggcccgacggttccattgtttcaaagattccaggttctccagttgatatcccacttatcatattagtaagagcattaggcttggagtctgacaaagatattgccaatgcagtttccttgaatgataccatccaggacgaacttgaaccttcttttgaaaaatctggcgaagttgctaccagcagagatgccataatctacataagcaaaagaattgcaccaggcatgctagaggagtttcaaataaaacgagctgaaacattacttgactgggggctattgcctcatcttggtaagaatcctgataaccggtacgaaaaggcattattcctaggcgaatccgcatgcaagttagttgaattaaatcttaattggattgaaccagatgataaggaccactatggtaataaagtaataaaatttgcaggtcagatgctagcagacttgttcaggaccgcttttaggaacctaataagagatatgaagtatcaattagaaagatctggtcaaaaacgaggaatcaatgcagttgcagctgctgtcaggcctggaattatctctgacaagttaaataatgctatagctaccggaaattggggtaggggtagggtaggtgttacccaacttctagatagaacaaattacatgtctacagttagtcacttaagaagaatccagtccccactaagtcgtagccaacccaattttgaagctagggatttgcatgcaactcattttggacgtatttgtccatccgaaaccccagaaggatcaaattgtggcttggttaaaaacttggcactgtctgcagtaatatcagtcagcgttttatcatcagatgtaattgaaaagttatacgaattgggtgttcaaaatgtgaacgagacgaatgatgatttgaaacaaaaaggtgctaggatatttgtcgatggtcgtttaattggatacatagaagatggtcgtaatttatcaaataggttgcgtactatgaggcgatctggcagaatgcatccccacatgggaatctatttttattcttctttaaatgacaacgcaacaaaaagattgtatattagttgtaactcaggcagggttttacgacccctggcaattgtaaaagatggtaatatcttactgacaaaggaagttatcgaaaaaatttcaaagaaattcttgtcatggactgatcttttatacatgggaattatagaactggtagatgctaatgaggaagaaaattgctatattgcaagtgaactaaggaacataacaaacgaccatacgcatgttgagatctttttatcttcgatattgggtgtaggagcttctatcattccctaccctgaacataatcaatcacctaggaatacatacgagagtgcaatggcaaaacaaagtttgggattctctaccccactaatgaatgcaagtacatatgtaagacaacattttatgctatatccgcagatgcctgttgtaagtaccaaagcaattaacttattgggattagatgaacgaccaaccggtcaaaattgtgtagtagcggtcttgccatttgaaggatataatattgaagatgccgtagtttttagtaaatcatctgtagataggggattagcacgtactttcttctatcgtgtgtatgaggctgaagctaaacaatatcctggtggaatgaaggatacatttgaaatcccttcctctgaagctaacattcgcggttatcgtggagaaaaatcttaccgtttgttagaaccagatggtgcaataatgcatgaatcagtagttaatgggggtgatattttgataggccgaacctccccacccagattcatggaggaatataaagagtttgaagttaagggtccatatcgacgggacacatcaatcggtgtcagaccatcagagaacggagtggtcgatactgttatcatgacgcagtcagtcgaaggcggcaaaatgtacaagattagagtgagagatatgcgaattcctgagataggggataaatttgcctcccgtcatggtcaaaaaggagttgttggtatgcttgtaaaccaagaggacttgccttatacagaagatggtgtagttcctgatgtgatgatcaacccccacgcatttccttctagaatgaccgttgggatgttcatggaatcattgggcggtaaagcagcttctttgaggggcaaaatagttgatggttctgcatttttaggtgaaaaattgaatgatattaaggatgtaatggaatcatacggattcaagcatagtggaaaagaagtaatgtatgacgggaggaccgggaagagattccctgttgatgtatatgttggcgtagtttattaccaaaagctacatcatatggtagccgacaagatccatagtagagctaggggtcaagttcaaatgctaacaaagcaacctacagaaggtagagctcgtgggggagggttaaggtttggagaaatggaaagagattgtttaattgcttatggtgcgtcaatgatgctaaaggacagacttttagaagaatctgataaagcggagattaacgtatgtgagagatgcggtttgttatcatattttgatacaaaacagagaaaatatgtatgcagggtctgcggtgacaaaggaaaaatttctagcgttataatcgcatatgccttcaaattgttattgcaagaaatgatgagtttaaatgtcgccccacgcttattggtaaaggagaaggtttaatctttttgtttttatataatggaggtctttttaagtgaatgatgaatctgtcaagatattagatggtattagatttagcatttggtcacctgtcgaggtaagaaagtttagtgttactgaggtgacagcaccagaaacatatgatgaagatggaatgcccgttcagggggggttgatggacaacagactgggaacattggagcccggtcaaaaatgtgcaacctgcggaaatacatctgccagatgtcctggtcattttggtcatatagaacttgccgaacccgttttacacatcgcatttatcgatgatattcataaattgcttttgattacatgcagatcgtgtaatcgtatcaagcttagtaatgaggatttagaaaaatacaaaaatttacgtgacagcaaggcagcatatgctgtaatcactcttgaaaacgttaaagacgagattattgaaaaagcaaagaaagttaaggtttgtccacattgccagaaagaacaatatgatcttatttttacaaaacctacgatctttgttgaaaaaactgatgtaggggagaatagattattaccaattaccattagggagagactactaaatgtttcaaatgacgatctaatattgttaggatatgacccaaagactgctcgacctgaatggttcattcttcaagtcttgcccgtacccccagtaacagttagaccatctatcattctagaaacaggtattcgatcagaggacgacttgactcataaactagtggatattattcgagtaaatcagagactcaaagagagcaaagaagctggaacaccacctttgattgttcaggatttggtagatttattgcagtatcatgtaactacttactttgataatgaagtatcgggtatccctcaggcccatcacaggtccggaagaccattaaagaccataacccagaggttaaagggtaaagagggtcgatttagaggatccctatcgggtaaacgagttgatttttcaagcagaaccgtcatttcacctgatccaaatcttactatatccgacgtgggagtaccaagtgatgtcgcaaaaaagctcacaatacctgaaactgtttctacctggaatattgataagctgaaaaatcttgttctaaatggacccaacaattatcccggagctaattacattattcggccagacggtgtaaaaataagactggactatgtcacggatcgagctgctattgctgattcaataatgaatggatatactgtggagcgacacctaatgaatggagatgttgtaatatttaaccgacagccatcattgcacaggatgtctattatggcgcacaatgtaagagtacttccatatcgtacttttaggctccatccggcagtttgtccgccatataatgcagactttgatggcgatgagatgaatttgcatgttccccaaagccaggaggcacgggcagaagcggccctgttaatgcgcgttcaagatcagctaatatcgccaagatatggagggcctattattggtggaatacgtgattttataactggggctttcctattgacaaaggatgaaacgatactaactgttgatgaaattgctaattttgcgtatttgggtggatatagtggacctttaccgaaacctcatttagaaaaggatgggaaaacattttttacaggcaaacagttgttttcacttttcttaccaaaggatttcaactttgtaatcacttcaaagtggaataaagcctcgaagttgcagggcaaggatgtagtcattaaaagcgggcagttaatgtcaggcgtaatcgataaagcttcaataggtgcagaagaacctgatagcgtacttcacagaatcgcaaaggactacggcaacgaagaagcaaaaaaattccttgatgctatacttattatgttaaagacctatattactcacagaggatttagctatgggtattctgatttatggttgagtgacgaaactcgaaaagaaattcaagatgtaattcaaaagacttacaataaaatcgatgaattgataaaacaatatcatgacggtacattgcctttaaccagaggtttatctcctgaagaagccttggagttatatgttgttaatgaactctcaagggcaagagacagagctggaaaaattgcggaccgatcctttcctgatgacaattctggtgtaatcatggcttcaaccggggcgagaggttccactttgaatattggacagatgactgcagctttgggtcaacaatcaatccgtggaaaaaggatcatcaaaggatacaggaacagggcgttaccacattttaggcccggtgatcaaaatccagattctaagggctttgttaaatcaaattatagggatggacttaatccaatcgaatttttctttcatgcaatggggggtagagagggtctcgtcgatactgcagtgcgtactcaacaatcgggatatatgcagcgcaggctcattaatgcattagaacatcttaaaattgaatatgatttaactgttcgtgacccacatggaaatatcattcaatatgtttatggagatgatggtattgatccggccaaaagcgaccatggtgatgccgttaatatcactaggttggtagagagcgaatccgttattgatgaaggagtcaaaactaatgagtccgaaatgaaggatttgttactgaaattcaaggagaagatgaatcctaaattaacacaggaaatcgaagcagcattgttatcctatccacttagcaaaactgggattaagaaagtagttcataaaattatggacctgttcgaaaaagcaatgatagaaccaggagaagcagcgggagttgttactgcccagtctattggagaacccggtacacagatgacgctgagaacttttcatttcgctggagtaaaagaaagaaatgtaacattaggtctaccaagacttattgagctagtggatgcaagaaagaaaccggttaccccaacaatggatatttatcttgatgatgaacacaaattgtctagggagaaagccttagaagttgcaaagaggattatttttacacggatatccgatttagtaaacaaggtagatactgattacagtgggaatttgtcatttttcttctctgaaaagaagatagccgatagaggaacgtctatacaggaaatccatgaagttttgaaaagttctaagaagagatacgaagttaccataaacgaggatactctcgttataaaagtttccctgtctcaagaaccagatgctcaaactttactaacgctacgaaataaattattgaacgggcgcgttaagggcgtccctgatattgaacgagtaacaattgtaaaacaaaatgacgaatgggtgatacagacagctggttcaaatttggcaaaagtggtgctagtagaaggaatagatgtatccagaatcactactaacaatgtattcgaaatatggcaaactctagggattgaagctgcaagaactgcactagtcaaagaagtcactaatactttagaggaacagggtttggaagttgacatcagacacattatgttagtggcagatttaatgacatctaaaggatacctgcaacaaatcggacgtcacggtatagcagggacaaagacttccgtattggcaagggcagctttcgaaattactgtccctacaatcgctagggctgcgctagagggacaagtggaaccattaaagggagttactgaaaatgtaatagtcggagcaactgtaccagttggaactggaatgattgatctatatatgagtgtcaaggaatagagaagcatatgaatgaaaagaagttggcaaaaatcctaaaggaaggtgtaaaaaataacaaaataaaaacaggatataaagaagttttacagtacatcaaaggcactaagttaattgtactttcaaagacattgacccctgaaaaagaagaaaaaataaaaaaatccgctgaagaaagtgctatttctgtgatatcttaccctggaaattccgtactactcggaaggctctgcagcctatcatacggggccagtgtggtttcattaaaaagtgtctctgatgaagaagtaaaagagttaatgagtagttaaatacttccacttatgcggaactctgattagaaaatataaaagtttcctcattttattaggccctgttaacttaggcgtttggcacctccttgttgtgtatttttacaaatagattcaaccagtttttgacatgatctagtttacacttctctttactacatggaaagtaatcgtcaaatccttcagttcgatccttgatgtactgcatagttctttcaatcagacttttctcaaacgaagaattgatatggtgttttagttttaggaatctacaagccattgggtaccaggttccaccgtctgttgatacgacatgttttccgtgaatcttgatcagacctgaaataaatctctctctgcgataagcatgttcctctccttggatttattagctaagaaagagtgcgagaatttgcctattttctggttcgattgctgcccataaccaagagtattctgatacgacttttattaatgtctcatcaatgaggtattctgatatttttgttcttcttgttgaaacctttcgaggtttatacctttgaatccaattccaaattgcaacgtgacttctattgataatatgtaaaaaggacaatgccttggcagtatttctaagcgataagcctagaaagtacaaatacagaccatagtaaatatgctatgaagatgttttagttcttttacttaacataacagaaatagagcgtctttaagctaaagatttatcgttaagttaacagggccttttattacttgtgtatattaaattttcatcttaaaatagacttaaattgggataactttgagagaattatttatacttggatgaattattcttttgttattgggtgcgtatgaaatgagtgaaaaaattaagttatctccagatgaatttcgattattatcgttatttcaaacagtcacggccgcagatgcccgggactgtataattgatgaaaagatggaacgtgtaatttttgttgtaaacagaggacaaatgggaatggcaattggcaaagggggctccaatattaagcagttacagaacgtgattaataagaaaatagaattggtcgaacattctgagaatccgaccgattttgtcaagaatattttcaattcaaatattattcaagaaattcgtataaacgatcgtatggatggaaccaaaatagccttagttgttgcagatgcaaagaaaaagggactagtcgtgggtaaggatggaaggaatgtagacaaagcccgcctacttgcaaagagatatttcaatattacgaatgtcctggttgttagtccggaacaattaattaaaagtgaaaagatgtgatctttattgagtaaatcaccgttaggattattctcgggtagggttttaaaaaccaaacgaaagcgctcccgatggtcaaacaagtattataaacgtagaatgttgatgttagataagaaggctaatccgttggagggtgctccacaagccagaggtattgttttagaaaaggtcggaattgaatcaaaacagcctaattctgcagtcagaaaatgtgtgcgggtgcaattaataaaaaatggaaaatcaattacggcatttttgccccgagacggtgcattaaactttgtagatgaacacgatgaagtagtcttggaagggataggaggctcaatgggtggtgcaatgggtgatatccccggagttagatggcaagtattcaaagttaatggtgtgtctctaaatcaattggtaagaggaaagaaggagaaaccaaggcgataacaatgagtggaaaagaacaagcaaatatgctcctatttaacaaatgggatacaagaaatattgaaatagttgatgaaggtctgaaaaatgtaatccatttacatccctcaatgacaataccggtaacatttggacgtcatgagcatcaacgattgaaaaaagcagaagtcaacattattgaacgactggtcaacaaacttatgcattttggaaaaagatatgctaaaaatacgggacgaatgggtggtaaaaagacaaaggttatgaatgttgtaaaaactgcactcgaaatcatatcgatagaaaccggtaagaatcctgtagaattactcataagggcaatagaaaatgccgctcctaatgaggatactaccagaatagtatatggtggtgtggtttatcatgtttcagttgatgtttcacctttaagaagagtggacctagctttgagattcattgccgagggagtgcgcgagtcgacttattcttcgcctcaagcaatggaagaggtacttgccagggaaataatgttagcctctgagaacgacatgaacagttacgcaataaaaaagaaaaacgagcaggaaaggattgcaatgtcatctagatgattacaaactatgatttctatcatttatttagtgacattcgatgagtggaaaagatgactatatttttagaaaacagaatttattggcaacccagtccgggagaaagatttttaaaagtggcttgatcagggacaaaaaatatacttcattcaaattttaccttaataagtcaaagaaggaatatgatggctttgttcaaagatataaagatggtatatatggattaataaaatctgataattctcccatacagacacatagggatttcataaaggaaattggtggcactcatgaattagagctttcctcgcaagaaattgaaactcttaaattgaagttggaatctccgactgatttgtttgaccgaataaatagaatacttaattctaatttcataaaaatgacttttcccgtattttatgctctttttgatggttatgctgagagtacgggcttaaacgatgacaaaatgagaaataatgtaatagatggacatttaattgccattgatttgagtgagcctatggataggattttggatagagatgaagaccttgattatcttgaagactacaaatttattaacccgtacatacttttattggcaaaacaaaagataagtgaaacagcacctggagtaatggaagaatttcagtctggttttgatgacgcacttttaggtcaacaaatcgattatgaattgaaaaccaaaaaacttgaacttacgtacgacaatttagagagaagttacaagaaataccgatcagtgctcggaactgccggtagaaatatgagtcttaatcaaaggcctttgtcagaaatttattatatcggtatggcaaaagctgcagagtgtgttgggtgtgggaatgagatccaagatgcaattgttactaagggaatcaagtcaccgtcgtggcctctttattattcaaaccttactcatgatgtaaaatcaggattcaggttaaccttggagaagagtaaagcatatttatctgaggcatcattggctttagaaatgctagataatgatataaagataaaaccctttctcgaatttttgttcctgacagttagtcattataatgaattctggtatagggagcttgtaactaaaagagccgatcttctacgtaaatttcagaacgaattagataaaaaataatttttagtttaaagagattggttgtaagaaataatgtgggtagaaaaataccgagtaaatgaatttgacagtttttttgggaatgaaaaatcaagacttctaatcataaattggctaaaaaagtggattaagggcgcaaaaccacttctaatcataggacctccagggactggaaagacttcgttcataaaatcattagtgaaattgcaagatcttgatttgattgaacttaatgcaagtgaccttcggaataaactaaatcttgaggctataatcaatccgatccttctaaacagtagtatttttggaaagcggatgctattgtttttagatgaggtagatggcatctcagcaagggatgattatggtggaatgccattcttgtcaaatatattaaagattgctgatattccgataattatggcctccaattcaaagagttataaaatgaaagagatcgtaaaaaatagtaaggtcatagaattcagacccttgtcgtcatttgcaagttatttgttgctccaaaatgtcatgagaatggagaataagcatttagaaagttcggagcagtttaagattattagtcaaagtcgcggcgatgccaggactcttttgaatactttgcaagcaaagctggaaggagaagtagattcagatagtaacacaggttctgaattgtcaattgaagagtgtattaacaaattttttactctaactgacatttcacaagcaaaacaattattgatgagatcctcaatacgttattcaactccaaaatacggctttacctcagaggaacgcagcaaagatttcttaaatgcgttgtatactagcattattagcagtgagagaaatatcccatcagatgatttggcaaatatgctagaaaagctttctgagattgatttatttataaaccggatttatgaaaaacgaaattggagcttattgagatatgccaacgacttgttcctccataaattatttagtattagtagagatatggctatagaatataaccaatattccgttcccttctcagcaatggggccaatatttatgagggggcaatcattaagacctcttagaatagaactatcaaagatatttcatacaagcgtatctaaaattggtcttttctattattccaactttattgtgattctgaaaaatctagcgatccaagatcttgattttgataattttgataacttaaagctaagtgaaatcctaaaaaaggaaattgaaaaacaatcaatcaaaccaaaactttaaacaatggatctggttctcatacctaaatagattctacaatggacaaggatcctttactagcccgtgattggttaataatgactataaaatttccagggttttgtttaatttgcaaacagagggtcaaccccggaataatgggttattggtctaggtcagctaaatcaatccttcatgaagattgttataatctttctggtcttcgtgctaaaaagaatcaagactctttaaacaataatccgattcagagcaaaaataatggggacagcctactcgccgactttatcacccagcatgaaaataaggaaaagtgtttcatttgcggtagtaagatagattttcaagagagtttgatattgacactattaaaacttgaacgaaatattagtactatagaaacaattttttgctcaacctgcttatctcgctcagatcttcatttatttgaagaatacaagcatgccttctcaaaaaaactaaaatccggttagcatagtctattttagcttttaaaaagattaaaatgtataatcctatacgatatgaactagtgatatatgttgtcaagtgaatatgaatataatgttagtaagctcttggcagaaaaagtaaaaagattacaagatttacaaaattcagatagatcttctaattatgaaaaagatttcttaaggatggaaatcgaaacccttgaatccttatatgaaaattacaaccttggtttgaattattttagacgtgctaagggaggcaggaatgggttacgtgaacttcgcgaaagggactaaacaaatccacgtggttcataaaatgaatccgcaattattcaaagcaaaatctatatttaatactataaaggattaaaaacataatatatgcgtgaggaaaaactaaaacaatattacgaccgaaaacatagtgctgaagcaggtggaggtccagataaagttgaatctcagcattccaaagggaagctaactgcgagagagcgcataaatcttttattagatccaaatacatttactgaaattgacaaatttgtaactcatagaggtgatgatcctgaagtaaaaaaatattatggtgatggtttgataactggttttggcaccattaacggtaggaaagtgtttatctacgtttatgattttactgttttgggtggttcattaggagaaatggctggaaaaaaggtatctaaagttatgtcacacgcactaaaggtgggatgtcctattattggtattcttgattcaggcggggcaaggatccaagagggtgtgtcaagcctagacggctatggtgatatttttctcaagaatgctcttgcttcgggtgttatacctcaaataactgctagtattggaccgtgcgctggcggagctgtgtattctccagcgatgacagattttgttatcatggttgaaaatataggacaaatgtttgtgacaggaccagaagtagtaaaagaagtccttagtcaagaagttacattcgaggatttgggaggtgctagaactcatgctacaaaatctggagttgcacatttcgtagcgaaggacgaggttgactgtatggataagattaaaacattactctcttaccttcctcaaaataataaagaagaaccggaatttttagaagctgatgttgacgatcctaaccgtctggatactaatttgataaatgtattgcctgacaatccatatcaatcttatgatattaaggaaatcattgctgctattgttgataatggcaatttcttcgaagttcacgaactctttgcggaaaacatagtggttggatttgcaaggatgggtggtaggtctgtaggtatcattgcaaatcagcctttatttttagcaggtgcattggacatacactcttcaaccaaagctgcaagatttgttagattttgtgattcatttaatattcctataattacgcttgtagatacccctggatatttaccgggagctgatcaagaacacaatggaattatcaggcatggaagtaaacttttattcgcatattgtgaagcaactgttccaaaaattacttgtattatcggaaaagcatatggaggagcttatattgcgatgggcagtaagaatcttggtacagatttgaacattgcatggccaacagctgaaatcgcagtgctagggccagaagcagccattactattatacataggaaaagtctaaaagattctcctgatgcagcaagcaaaaagaaaagtttggcgaaggagtatcgaaacaagtttgcaaacccgtacattgctgcagaaagaggaacaattgattctgttattgatcctatggaaaccagacctttaatagtaagcgccctcaacgccctttctaacaaaaaagagaataggccatggaaaaagcatgggaatatcaatttgtagaaaggtgattggatgtcaaaacaaataaccagcatattgattgcaaaccgtggagagatcgccctaagaatcattagagcctgcaaggaacttgaaataaagtcagtttctgtatattcggatgaagataagagttctatccacgttaaacgagctgatgaggcatatcatattggacctgcagctcctgctcaaagttacctgaacatgaaccgcattatggaagttgctgcaaaagccggggtggacgcgatacatccaggatatggatttctttcagaaaatgaatcttttgctgaattgtgtgagaagaataatattattttcatcgggccaaagagtctagctatggagctgactggagataaaatgaagtgtaagcgtataatgaaacaggctgaagttcccacagttccgggtagtgaaggagttatcgatgacgttgataaagcagtcgaaattgcaaatgaagctggatacccagttttactaaaatctgcatacggtggagggggacgtggtatcagacttgcaaaggacgaaaaggagttgaggcaagaatttgaaatggcttcagcagagtcgaaagctgcgtttgggaaggcggctttatttgtggaaaagtttctggagaagatccgtcatatagaatttcaattggttagggattcccacggtaacaccagacatttgtttgaacgagaatgttccattcaaagaagacatcaaaaattaattgagatgtctccctctcctataatgacctctgaaaagagaaatgaaattggggagatagcaaagagagctgctgatgcagttgactatctaaatgcgggaacagcagaatttctgtgcgatcctcaaggcaatttttactttattgagattaattccagattgcaggttgaacatcctgtaaccgagcttgttacgggcctagatttggtaaaattgcaaatatctattgcaaatggcgaaccaatcccctttaaacaacatgatctcgcatttcatggagccgcaatagaatgtcgcattaatgcagaagacccattctatgactttgcaccttcagtgggtaaagtaccttattgcaatttgccatatggtccaggcatacgtgtggatacttatttgtatcctggatgcaccgtatcaggcttttatgactctttaaccgctaagctaatagcttggggatcatcatttgatgaatcgcgtcgaagaatgagaaatgcgttagatgagttcatgattgagggaataaatactactatcccattgtacaaaacaataatgaatgatgaacactttattaatggtgatttgtcaacagattaccttgataggtattctatcatagagaaaatgagaaaagaattaaaggctaagaattctgatagacaaaatagactattaccggcggttgcatctgcgatcattcaaaccgaaaatgtgaaacgtcccattaaaagggatcattctgttcagaatatctggaaatttggcggagttgcttgaaatagaatggaaataaaggttaacgatatacaagaagaatttgaaggtaaaattataggttttgataaggacggtaatttagttgtccaaattaatggatcagatcacctcataaaggtattagatatgaaatcagataaatttgaattcttgtttgacaatgctttccatgaaattaagattcttgaagtcacaagtacagaattaaagatattattagatggccaatcaatgtcgctcaagaaacatgcaaaattaactgaaataattgaaaaatcaagagccaatacaggaggtgccacttcccttaatacaatatccagtcagataccgggaagggttatatcaatttcagtaaacaaaggtgatgctgtcaaacagggggataatattgtgattttggaatctatgaaaatgcaagtcgccatcaagtcgcctagagatgggacggtaagagaactcaaagttaaagaaggtcaaagtatatcaagaaatgatgttgtagcaattcttgattaacatacctactttgttgtctatagttaccgcacttgattaatcattttaacaaattaaagaaaatttgatttttatgtgattatagtcttaatttcttcataattgggttcgataagggggttgtctgttacccatttgtatactaccttatggttgttattgtccacaatgaatatggatcttttagctactttgaaatctcttaatttacctaaactaggcatcacaacattgtattgttcaattacttccctattgtagtcgcttaatactggaaagtttaggttatggtgttcagcaaaaactttatttgcaaaaggactatcaaccgatattcccaagataattatgttttctttttttaagctactaagagtatctctgaaattgcacatttctaccgtacagactggagaacctgcggccggaaagaaagccaagattgtcaacccttctttattggctgataatttatgaacttcctgattcgtgtctaaaagctcaaagtctggtgccatatcccccacattcgtattcttgttattagtttcagtattcaaattatttttctggttcgaagacatattatgataatatgtgattagcattaaaaagaacctttctatattactatgagcaatttaaggcataaccattatttagaatgctctgcagaagatatagccatacacctttgctttatacaaaaacatccccgtttatttttctaaattctatgattagattttttaaagtatcaacagcaattttcaattcctctagagtattttggtatcctatggaaaatcttatcgaaccacttacctgatcaaaagtcaaacctagagcttttagaacatgagattctttttgtttcttgtttgaagaacaagcagaacctgtagaagcctcgataccatattcatctagttttatcaacaggttttctccatttattccagggaaagaaaagttaacattgttagaaattcgattctcaattgatccatttaatatggaccctggtatttcattgattattctgtaaatcatgtatctctgaagttccttaattttgatttgggcggattctagtttctctttccaaatttcgcatgccttgccaaagccaacaatggcacttacattctctgttcctgatctcagattcatttcttgtccaccaccaaaaattatcggcttaatatgcattccttgttttatgaatagccctccgatcccttttggcccatttatcttatgagatgaaatcgtcatcatgtctattttcaagtcattaacatttattggaatcttgccaagggcctggactgcatctgaatgaaaaatagtgttattattttttgcctttgcaatttcaaccatagatctgatgggttgaatagttcctatctcgttatttgctagcattatactaatcaaactggtttctggtgataccaattccctaaaaatatctaaatcaatcaatccatcattctttatgggtacataatctacctcaaattccatatccttctctatgaatttaatagtctctattattgaatcatgttctattttggatatcaataatcttttacctgttggttttagagtggatatcagtctagcacatccgatcagggccaagttattagattcagtcccaccagaggtaaaataaatttcgttagatttagagccgattagtttagatatccgtactcgggccttagaaatggcgatagtagactttctacccaacccatgaagtgatgaagggttaccatagaaactggttaaaaatggcagcatttcatttattacattaaggtcaattggagaggaagatgcattatccagataaatgggttccttggttttattacgattattttttgacatatttatctattgttattatctcattctcattctgttttcttgtatctttttttccgtaaccttccagatctaaagtgacatgtttaaagcctaactctttgatctcaaatactatcttatcaattttgtcaagatcgtataacttgatgatttcactcttctctacctcaattctagctattgtgtcatgatctcttactctaacctgtcttacatccgataatctttttattattatctcacatctttcaatgcgttttaatctgatagaattaatttccgttccgtgaggaacccgtgatgccaagcatgaattcgaaggtttatcatgaactgataaattattgattttggcaaagtgacgaacttccttcttgccccatccaatttccaataggggactcttgatcccattagaacgcagtgcgaccattcctggtctatcatcatctaagtcatctagattagtaccatctacgatcagagtgatatttttctctttagctaactttagcaaattaatggccagctcatttctgcagtgaaagcaacgaagtttatcattcttggtgaaatctggattatctaattcgttgtattctagtaaaagatgaattacatcaatctctttggccacttttttagctgtttctaattcttcgtttgccaaagtctgataatttgctgtaattgccagaactttttcttttccaagtgcctgtcttgctgcgagggccactaatgcgctatctactcctccggatagggcgactagaactttacaatttgtggatttaaaccaattaattagtagatgatatttactttggtttgaatcctcctcactcttgattgaattaatcgacatctaagatcagctatatatcgtatagattcctttgaaatattaaattattgactgtttccatcgtcttcctcaaagaaaggccaagcttgtttgagatttctctaatattatcaaactctggttttacgttaattattcttccttgctgatcctttgatatctttacacttatgacatattcatgattttcaattatgatagggagcaatacactaaaccgttccagtttatacctttcatttgttgtttttctaatacctaatgttcctgtctcattaaaaatccattcaatgatatttttttcaatgtcctctgaacaaataaccttgagaatatgtactggtctgttcttcttagttattccgtttaccattgtgacatccttcacacctacatcctgttttgataacttttctaccaaatcaccaatcatctcaccggtcatatcatcaatatttgtctcaagaaccgatactgtatctgaatgtatggagtagtgaatattcgattttccaatagaaattcttaatatgttaggaagaccctcaaatttcttaaatccagcaccatatcctatcttatgaggtataaattcaggatatgtactaataattttgggattcaatcctgctaatattgctgctccagtaggggtagttatttcagagtgcactggacctccagttattggtagctctaaaatcctaaaaatttccaacactgcgtttgtaggatttggaatcgttccatgtgagaaatgggttgttcctcctccaacagcaaccttagtagaataaaaagttgtatcgaaaaataaatccaagtcatccagagcagttgcacttccaattaagtctgcagccgtgtcaaggctagacgactcgtggaggtgcaagtctctaacttctctaccgtgaattcttgcctctactctaattatagtttttatcgtctccattacaaatttttttgccatttcagaaagatttgtaacattgcagctatcggccaaaattcttaacatctcagaggcatttcgttccaatgatttctcttcaatctcaaaaagaaattttgttgcccttattccatttgattcggaatttatgaattctatcttttttattctcgtatcggaaaatagtttctctatactctttatgttatttatgattctgttcttattggcaccacaatccaccaaagcagataagaacatatctcctgaaattcctgcaacctgtggatcaattacaactacttttctcaaatataattttattatatgactcctctataatgggttttatagtccatataattaatcacggatcgaatgcctctataaggcattgatatgattattaaatctttgaatattaggagaatttaaaactataaataaaaaaaataatgtcacatttgtatgacaatatctattattggttctggtagagtgggggcctcggttgccttaaattgcggtataagagaattagatcctcaaataaatctaatcgatataatcgagggattgccgcaaggggaagcaatggatatcaatcatcaattgtctgaacaaggtatagacagttttgtccagggcaccaatgactttagtattttgaaggattcggagatagtcgttttagttgccgggattgggcgtaaacctggaatgacgaggatggatcttcttaaaacaaatgcttctattgttaaggatgtttcatcaaaaattgctcaacatcgtcaaacatgtaaactaattatagtaactaatcctttggacccaatgacatatcttactctaaagaccacaaaatttcctaaaaataatgtaatgggaatgggaggaatgctggacttgtcgagattctctagttttattaatgaatatactcgtatgtctagaaattcaatttcagcaatggtgattagtgaacatggagaaaggatgttaccactaattagattttcttcgatttctggaatacctttaagtcatttcatagatgaaaagcaatcaaaagaaatctatgaaaaaaccaaacaagtggctgctgaagtcattaaatataaaggcgctacagtatacgcaccaggcaatgcggtggcaactatggttgaatcaatagtaaaagacaaaagaactgttattccattatctacatatcttgatggtgaatatggggtaaaagatgtgtgtattggggttcctgcggtacttgggaaagatggagtagaaaagattgtagaattacccctaaacgaatttgaacaacaagagttcacaaacggagttaaaaatgtgaaagaagcaatctctcttctgccgctttaacttgtttgtatggtttatggacttaagaaatattttgttagattattacaatgacaagaaaagccttgatgaagtgatcaaatctatctcccttttttctgtggaatacatcgagaacgatatagcccaaatcgatattaaccgcgattttagaaaatctattccagagattattctggcatcacacaaaaaaaccagcgaattggtgatcattattaatcgaatccttgagaaaaaaggctatgtccttgtgagtaaaattaagcctttgatagtaggcaaattggtaaattattatagcgaaaagggtcttgtggtggacagaggccacaatggaacttctatactagtgtatgacgagataacttctcttcctaaaaatagaggaggtaaagtgggaatcatttgtgctggtacatctgatgtggggattgctgaagaggcacgattggcaactttagcaatgggttgcacgtcttatcttgcttatgacgtaggtatagctgggatccacagattgctcaactcattgaagcaaatgatgtcgagcaatatcgatgtgatagtagcagttgctggaatggagggggcacttccagctgtggtaacttctctggtatctgttccagtaataggtgtaccttgctctgtgggatatggttatggcaataatggtaaaggtgcattggcatccatgctgcagacctgttcatttggtctttctgttgtaaatatagataacggaatagggggaggtatttttgcaagtataattgcgaacaagggccggtgaagagttcaaatatttttatgattcttatacaaaatatctgttaaccctccgttgtttttgactcattcgtaaagtttttgatgacggttcgtaaattccttttgaaaagcctatttatcttctcgctaagagaaaatatgatctataaactcctgttcagctgattgcccttacagacaagaatacaaagggttaatggacctgccttttgcttggacatttagccttccaatacttttttgggatcttccaacaattgtatgcaaaaatgcataccttgctttatgtaatcattctgttttttatgactgacaggctaatccaagataaaagaataatctaatgttatcatagtttttcgacctttcataaagtctaccatgcataacagattcaaaatgactaaaatattctgattgatttaacagttatacaatgaatcttattttgaacttgatgatatgtttgatctgcttattcattaacattatttcttaatctattttttaaaacgtttataagagatttaagagaatttttttgattgttagaataaaggagaagtaatgaatgtcttacattaaaacgcttaaaagaataagaaataataaaacaaattatagaaaaagaaaggctgtgttaattagcaaaagaaatttcataacggtaagaatcagtaatcaaaatattcactgtcaattaatcaaaccgtcgattaaaggtgatatcgtcctctcattttccaatagtaaagagctggctaaatttgagtggaaaggttctactaataacttatctgcttgttatctggtcggattgatgcttggaaaaaaaatgcttgccaaaaaaattgattctgccattttgtatactggtcagagatctttcacaagcaaagtagcagcctgtcttaaaggtattgctgctgctggagtcaatattccattatctgaagaaactttgcctgatgaaaatcgaataaatggtacccacatatcactatatgctacaattcttaaggaggataaaaataaatatgagaaacaattttccgggttatttagtaagaatattaatccagaagaatatccaaaacattttgaagaagtaaagactcgaatttctgccggaaatttcaattagggtgaaaacttgactacaataatatttaccgaaagaataataaacaaaaaaataactgattttggtaaggtactaatgtgttgagaatgaaagttattatgattaatgaattgataatgccttatggatcgggtgtaattaatgagtaggatgtctaggcctagtgaacctgaggtagaatggaaaccccgaactacacttggtattatggtagccagtggtaaaattaactctatggagcaaatatttgagaatggaatgaggattcaggaatctgagattgtgaaacaccttttgcctgatatcaaaactcaggtcgtaagcgtcgaaatagtacaaaaacaaaccgatgctggcgaactcactagatttaatgctcttgtggcaataggcaatgagtctggttggtttggaataggaaaaggtaaagcctcacaaatgagaaacgctatagacaaggccaccaatgcttcttatttaaacgtcattccagtaaaattgggatgcggaagttgggaatgtcgatgccaccaagctcattcggtgccgtttaaagtgcagggtagaggtggcagtgtaacgattgaattgatccctggccctcgtggattaggtatagtagctggtgagaatattagaaacttgttgaaattagcgggattaaaggattgctggagtaggtcttttggatctactaatacgatgtcgtctactgcaaaagcaatttttagtgcattaagaagtacgtttatcacaggataggaattgaaatggtgtttttagtagttagaatgaaaggaactgttaacattcccaattgggcaaatgtaacacttgaaagtttacatcttaacaagaaatttcgtgcaactttgattccagaaaatgaccaaacattggggatgctcaggaaaataaaagaaattgttgcttggacttccgttgaggaaaactttatcagagaattcatagaacaaaaaggccgtgcatcatcatctaaattgctttccaatcagaggcaggaggaatctagaaaaacatccaatactgacattagcaaggttgtctctgatgtctccaagaatgaaacatatctttccaaaatagatggaataaaaccatggtttgcgttgaatcctccaagaggcggatttaagaaaaaatcaaagcttttgcactctcaaaatggaatattgggggaaaataaagatttgttagaaatcgtaaagaggatgatgtaatctatgaacaataattatttgtcgtttagtaaagcattgcaaactttaatatttatacccaaagttgcttatccactaagggacatttggtgataatagatggctactcgattaagaaaaagtagaaaacagcgcggaagtcgcttttgcggatggggccaaattggtcaacatagagcttctggaagtagaggcggtgtaggaggcgctggaaagcacaagcacttcttcatcagaacacttaaagaggaaccgaatcattttggacatgaacaatttcatgcattaagaccaagcgattctttgagatggataaatcttaaagacttgaatgagttggtaaaatattcagaaactagtgaagatggtaaggtcatacttgatttagaaaagttggggtatgataaggtattgggtaatggagccataaactctgcccttacagttcgggtaaaaaggatctcagactctgccaagaacaaaatcacagcagctggaggagaggtgctaattttagatgagctcaggtacagaatgatggtatatttagaacaatcgtaaagacaatctcccctgttatcccacaagttgagaaacctaaaaagaaaattactctaactaataaattgatatggactggcattgctatgcttatatacttagtaatgggccaggttccattatttggaataattatcgatcccgcaaatgatccattggcttttgccagagtaatctttgctgcccaacagggaactttgttggagcttggaattggtcctattgttactgctggattgttaatgcagttattgaaaggttcggatatattaaaactaaactttaaggatcctaatgatagatccctttttacatctgctacaaaaatagtgacaataattgtaatcgttgcagaaacactactgtatggtgtaagtgtatatggtggtgctactccgtcgggcctccacttggccgtattaataacgcagttaatggcggcgtccattatagtcatgtacctcgatgaattggttcagaaaggatgggggcttggctcaggaatcagtatattcattatggccggggtcgcgcaagcgataatgtggagtctctttaatcccataccaatacctggtggcactgaacctagtggcttgatacccttcatgatcacaagcggaatggagggtaatataggagacgctatactccgtgcgtcaccacctgcacctgtaccaaatatgcccagcctctttggacttgggatgactgcgggaatattgctgctattggtctacgttcagggtatacacgtggacatacctatagtatcgacccggtatcggggctttactgcgacatatcccatcaaattactttatacgtccaacatccccgtgattttggcgtctgcgcttttggcgaacgcgcttttcatagggcaaatgctctgggtaaattacaatcctaacaacgataatcctgccttcaactatatagcgcagtacgacgcgcaatcgcagaaacctactggaggtctgttttattatattactgcgcctagatcctttgaggctgtcgtagcggatcccgtcagagcggttgtatacgtattgttcttgacgacgattgttaccatctttggccggctttgggtggagctgaggtggactctctgcgaaggcggcggcgaagaatctattggatgcggatgtccaagtacctggttttagacggtcggaaagttcagtggaatccctgctaaaccggtatatcccgtctgtgactataataggaggagtaataatcgggttattggcttctgtatccgatttattcaatgtttttggaactggaataggtttgttactgatggtggatatacttgtgaactactataacttgttggttagagaacaagtcgacgttcatatgccaaaattggcttccttattaggacgcacatgaagaatttggtcacatgataatgatttcaaaatcaaaatcattatcataccacatattctcaaattttaatactttgcaaattaatgaaactattattatcaattataaagctaaaaataaaggatttattttctaaatagaattatatgactaagcgcgttatgatagttgggattccaggcgtaggaaaatctactgttataacaaatgtatttaatttgctctctcaagagggtatcgatactaaaatcgccgaatttggtaagatcatgttcgaacaagcaaaactcctatcgatcaacaatcgcgaccaactcaggaagttatctatagagcagcagaggtctttacaagaaatgactgcaaactatattaattcattaggtaatgacgttgtaattatcgacacccacttatttatcagaactgagcacgggtattatccaggtatgccgttaaaattattaaatataataaatccttcgcacttgattctgatcacagcaaaatctgaagagattcataaaagaaggactgacgataatagcagacaaagagatctgatttctattgaccgtattggcgatgatttaaggttatctgagagtatgatatcttcaagctccataatatctggttgccctttctatattatacaaaataatacaaatgagattgaaaaggctacagatgatatttgtgaggtcatattaagaaaatgatagcaaaaaaatcattgatagctttatatatacacaggtcactattgacccaaatctagttttagtgttaaaaatgggatcaaatcaaattaaggatattaagaaaagtgaagacaatgtggatcgaaagatgagtattgtaatttctggatggcccgctgtgggaaagaccacgattgctgaaaatctagcaaaggattttaatctaaaactttggaacgggggagatatattaaagatgatggcgtttgaaagaggttattcttcgtcactcaatcatgattggtgggatacagaagaggcagctaaatttatgaaagaacgcaacaataatccaaactttgacatagaggtagataatcgtttgattgagcttgttaaagagggaaacgtcgtcattactagttatacgttaccatggatctcagacgcaacaataaatttttggttgcagggctctgttgataatagatcaaaacgtatgtcaatgagagataaaatagatattaatattgccaagaaaatagtacaacgacgcgatgttgaaaataaattaatttatcaaaaactatatcagtttgaatttggggaaaagctagatgtattcgactttgccatgaatactgatatcttatcattaaaatctttaattattatttcaaaaaacatagtagagaatgtattaagttcatcttgaatattataaaatttaaaggtaacgaaaattaatggaatttaatcttcctcaattagacaaattagtaaagataaatgatggaacgtccgatgagaaatttggatattatcctaataatagacccattgcccaattattgagctatggactgattttgttggacaaaccacctggcactacaagtcacgaaattgtttcatacgttaagaaaatacttggtttggaaaaagctggacatagcggtaccttggatccaggaactactggattgttgcctattggattagatgaaggaacaaaaatagtcccagtactactcatggggccaaaggaatatgttgccttggctagacttcatagtcatgtttccaatgagaaacttagtcaagtactgaaggaatttacgggtcttatatatcaaaaaccaccccaaagatcatctgtgaaacgtgagacacgcattagaacgatttacgaattggaattacatgatcaatttgatcgattgttattattaagaacagtatgtgagtctggaacatacattcgtaaactaatatatgatataggggaagttcttgaagttggcgcttcaatgatcgagttacgaaggactaaagtttgtaattttgtagatgaaaccgactttgttagactacatgatctggtagatgcatttcagttgtataaagaatccggcaatgaagagaaacttcgacgaatcatgcttccaattgaaatggctatgactcatattccagcaataactattagggatactgcaattgatgctctatgccacggcgcacagttagcactccctggcatagtctcaattcctcaaaacctaaaaaagggtgatttagtaggtatctattccctaaaaggagaaatcgttggactgggtatttctgtattagattttgatgaatttcttagtaaaaagaagggaatttgcttccaaataaagcggatcgttatgaaaccaaacacatatcccaaattttggtccacatccgactctaatgcgaacccagccaaccataatgtaaccagtgatgaatcgatctttacctaattatgaattgctgatccaaccaccacatgtgattgccaggcaatttaattggaagtagaccgatcagaactaaattattaaatagtctccccgagtcctgggcttgttttatctagcatcgatatttttcttgcgaggttttccatagtaccgggcaaatgacaattacacatgcagtcatcacattctatgtgttttaaattcttgcaagagtttgaaagttgtaatttttccatatacctatcttttaataacgtgttctaaatttaattgtttaatccatagaaaattttatttaattttgatgtgttatatcatcaagtacaatttggtggtgagatttggtaataaggatctggctaaatatcctttcttaaaagaagcgttttcgtatattactaaatatgattttaaactcgatgatctcgaaagtagagattatctgcatctagtaaacaaggctaatgaaaaaatagagcaatatttattttttgaaagagatgaatatcaaattaattataacaaaacacatgaaacgatagtacaggaagaggttatcatattccttatttcattgttattagtcaaatctgtttcaatcgaagcagtgactaaaaaatttgcattgttggaatcaatgagatttgaaaagtaccttatttctgatttaaatacagccaatcgagatgataaaactatcaaactaatactctacaagatttttgaggatttatttagtactaaaatcttgttagaagaaaatgtttataacttttacaaaatccgaatcactgattatttggatcaccccattgcatttcaagagaaagaatggaatttagtcaacaggactcttcacaatggatttgtgtatttggatggaagtgaaatagtaaggttattcagaaatgaactttatttattaataattgacaggatcaagaaaatgaacattgatagaatccccgataccataatggcgatttcaagttctatcaaaactcgttgggaacaaatgcacccgtcattttatacacctgtttacaaagcagttacacctccatgcatccaacacatatatgatcaaattagtaaaggtgaaaatttgccccatcctgcaaggttgcttttgggcacatttctaatttattccaataaaactctggatgagatgttagatcttttcaaacgattacccgatttcgatgaaaaaattactcgctatcagttggaacaccttgcaggtaaaaaaggtggttctaaaagatattatgttccctcttgtgaaaagattaaactagaaaatttatgttatgagacaaaaatatgtcagggaattagcaatcctattcagctcattaggaagaaatcgaatatctagtatgtctgatgcactatcctttgattcaaaagattccatcaaaaagggcaagcatacatccaaataccagaatgcagagcctggcgataagaataagaattggcttgaagggatcttcaggaaatactatttttatcattactcacaactcgaactgcatgagttgattaatgaacatgaatttggatttagactgttcgacggaaaaatccatcggcacttaacctttaacgataagaaagaattatatgcgtatatcataaaattttctccttcagatatcttttattcctcatccaggtatcaaaatccgagggcagaaatcgatcaaaaaggttggatcgggtctgatcttatatttgatattgatggaaaggatcttcatttagaatgtgctcaaagtcataacttggttaagtgtaaggattgtagttttatttctaaaggtatcatttccaaatgtgaagtatgtaatagtactcgattacaaattatcgaaatcccgtgcactagatgtttcaaatctctaaacggggaagtcaaaaagctaatagaaatactttatgatgattttgggattgataaagaatgtatatttatctatttttcgggtaacaacggatatcacattcacgttgtcgataagattttttatggtgcctcagctaagaaaagaaatgcttttgcacaatatttaatgtgtaaaggatacatgattgagaatttaggatttagaaaaaacgctgaaggagtacttattccgattcacaacaaggttctctataaccagggctggagaaaaagaatttttgattccatgcatttacccattcagaatcataggattgatgacaagtttgttaagaaatataatcgcatggaggatgcaaatagtaccaacatcaaggacattattagtacctatatttttaacctatctgcaaaaatcgaccctaacgtcactatggacgttcatcgaattttccgacttgctggctccgttaatagtaagagtggattaatcaaagctttttgcaaaaacttggattcattcaatccatttgtggatgcctgttttatcggagattctaatgttgaaatagaatcaaaattagacataaaaatatctttgaaaggaaaacaatttaatataaaaactggaatgaatactcttccagagtatgtggcagcctatgtgatttgtaagggcattggagatattcaagaataaacatagtattaaattatgatgtccaggttattagtaatggaccatgattcagattatgagccaactgtagaatactgggtccttgcatttttcaaatcacattcaaaaaatagagcatattacaggcaattcatggctgccggattttatgaagcgtttgatatcgtgatgacattttctgaaaaaacatcttatcaaattctttggtataaagagaaacgaaaatgtgattcaaaattcacagaattaggtatacctttattggaaagcttttgtaccttttgcaataaagagtttaataatattgagccaataaaatgtaattatgaaaaaaataacttcagttgcaagtctgaattttgttctttagattgtaagcaggaacatttttattttaagcatgttagatgactacttgatttttgtaatcaggtcgcttttcttattatttctaagtatctgtttaccatttcaggatcaattacaccttgaacgaccgagggagcaccggattccaaaactatatccattgctactgcactgtaggggatatcaaattcctcaatctcttgcgaatcttgagtttcataaatttgttcatcgctatttccagtaattttgaatgccacaatcctgtcaattttacgcatacctgatcctccgcccctaccccctgctgatccagccgattctttaaccatcaaaacaaatattgtattttcattcttagtgtcatctactaggttcaaattaatttcctgagatgaaactatcaatttccgccttggaagttgcagtgtccctgatactttaaagaccatgcgattaagagaatgcatgctcataaaaatatttattgtatctggtattttggtagaaataaataatgagtagataaagtaatctatcaattatggctaagcctaacaacgggagttatcttactacaatcgcttgggaaaatggtggtgtgaaattgattgatcaaactaaattacctgaatcacttgaatacataacctgtaaaaactatatggacattgcagacgcgataaaaaagttggcaattcgtggcgcacctgcaatcggtgttgctgccgctatggggcttgccctgtgtgctaataatagcagctgcaacaacaaggcaaagatgatggaggagttaggacttgcatacgacattttgctcaaaaccagacccacagccattaacctaaaatggggattagatagaatacttgaggaagcaaagaaatacgatggggtagacgatatcaagaaacatacaattcttcaagcaattcagatgtctcatgacgatgttacaaccaataagctgttgggaaaatttggctctgaattgatcaatgatggagaagtagtaatgactcattgtaatgctggagctttggctacagtttcttacggaacagcgctgggtgtaataaggtcagtaatggagtcggggaagaagattagtgttattgcaacagagaccagacccgtaatgcaaggatcaagacttaccgcttttgagctagtgcatgatggtatcgatgttagtttaatcccagatactgcagtcggttatcttatgtcaaataagatgatagataaagtagtggtaggagctgatcgaatactaaaatctggccatgtttttaataagattggtacttatcaggtggctctcctggctaaagtgcataatatcccattttacgttgctgcaccattgtcaacttttgatatggacaataacgaagaagatattattattgaagagcgttccgtagatgaagtggtaaaaataggtgaaaaaagaatagcaccagtaggggtaagaatttttaatcctgcatttgatgtaacctctccagacctaattgctggaataatcacggagaagggtgtgatttatccaccatatgaattaagcctgaggtcactatttaagtctgacaaataataggaatgctacgtctaaaatccaatcaaaaaaatttaaaaagcggttgactacacattgaatagtgcatacagagcaaataacaaaggatagagtcttttctgaattaagaaaatgtatggatccagaaattccagttaatgtagtagatttgggtttgatctataatgtggatgtttctgataaaaataatattgatattaaaatgactatgactactcgtggttgtcccctacacgatactttggtaagtgacgtaaaaaaatatgttaataccatagagggtgttggggatatcaacgtacaaatagtgtgggatcctccatggtctattgaaaaaatgaatccggcggttagggataaactaggattcggcaaaccatcattgagatttaagattgactatgaaaagtatatgcccatgaaggttggcaaagtgactaagcaagaggacgagtccttagctctagttaatgaaaagggtcaaggattcatggttaatgaaaacattatcgagttttgggaaaattgtactggagataaaaccataaaccaattagccgacaatttctcaaaaaaattaagtctcccacgacaacaggtagaacaagaggtagtccagttaattcaacaactgatggaagcggaattgttactgccttctgacgcgaattgatcgggtttagataggtaggacccaccctgatcagcccagattaacccaacccaaaccaaatcattcaagagtatcccaattcgttcaaatcatgactccttgatctgatatcaattggtttctttattgtgagtttccttcaatttcaatgagattagatttcttaattcatcgtctacaatattatccgaatttatgtttaaggatttggcgataatttctagtttttgccgttcggatgatatgggtccttgaatctgtggccctttgtaaacgtgatcatcggtagtcattgacacttctgaaacgaacatgtttttttgatccattattttccctttagccttttcatattctcctacaaatttacccatggtttttgaaatacttccaattttctttggaaatatgaaaataattacaacaataaagatgataaaccattcagaacctgcgatatttagcgcatagcttgggaaaaacattgcctacaattaatggacaaatccagtattttttcttttactagcgttatagtttccaaaaggactaacctttgatttagttgtttacctcaaggagaaatgaaaatctttgtcaaaatataataacaagataataaaatattcaaattgtgaaatcaggcggaaacaaggaaaagcctaatagtctcttacagagcgatgttatcttagaacctttcgacaatctcattagaaaattcaagtcaggtgaatacatcgtatcagtttacggcttaggtcatgtaggagctccgattgcctctgcttggttgaggtcgggtgtgactgtaatcggcattgataagtctgcaaaagttttagaaaatgctcgaaaaggatcaactcatattccggaacctatggttaatgaaacttttaccaatgggttaaataataacaaatttttactatatgatgacccgattcaagcatctcgaaattcaaaattgaagatgatatgcgttcctgtcttgataagaaaagacaaagctgatttagatgctgtaaaagaggtagccttagctattgggactggtttgaagagaaatgacatcgtctctatacatccatctgttccgcctggaaccactgaaaagtttttgattcctattctagagaaatcaagtggcatgagatctgcatcggatttctttgttatctataaccccgagagaatttatgagggtcgtgccatttttgacatcgaagagggtcatcctggaatagtatcctcaaatgatgattatagtctagatcttgcggaaaaattgtttggtcttatttataagaaaggactagtacgaatcttgggaattaaaaccgctgaagctgaaaaattatttgaaggtgtttacagggatgtaaatatagcactcgcaaatgagcttgccaagttgagtgataaattaaatattgatttttggcaagccaaaaaggcagccaactcacagaatttctgtcatattcatgatccaggaattggggttggtggtgcgtgtatcccgatatatcctcaattcgttcttgatgttgcaacaaaaaataagataaattgtagaattactaaaagtgctagagcaattaataatgatatgccttcatactctttgaatagtgcattaaaaatgcttccaagaaaggtaattaggaaatccaaaataacaattttaggccttgcttttcgtgggggagtgtctgacacccgactctcacccacctatgatattttaaaagaattaacaagattaaaaattaaggacgttatagttcatgatccgctggtaacagaagacaatataatttcaaaatataaaaatgtagaactagttaataatttagattatgctgttaccaatcgcgatctaataatcttggctaccaatcataaagaatatttgaagctcaattcctccataatcaggcaaactcctatttatgatgggcgaggctatcttaaccccgatgatttcgaaaaaaagctgtatagaggaataggcagaccaattcagtcatgattctgtgactctacctcaatttgatttctaataacatttttatttattttcataacaaactatctttatggtcaagacacagtcttcacaaaaactgatagctggatctcaggcacctgatttcttgctaaagggagttgacgataaaaattactctttaaaggatattaattctcgtacccttttgatagtgtttatttgtaatcattgtccttatgttaaagccagaataaatgatttgatctctttgcaatctaaatttgatagctctgatttacaaattattggaatcaatagtaacgactcaaattatgaaggagagggatttgctaatatggtgaaatttgctcaagaatattccctcaatttcccgtatcttatagatgaaactcaaggagtggctaaggactacggagcagtgtgtaccccagatccatttctatttgatgaatccaaaaaacttgcttttcatggcaaaattaatgacgctttagaacctggctctaatgccacagtcaacattatggaaaacaatattcaaaaaatcctggctggaaaaaaatctagtatcgaaaaggattttgatccatcaattggatgttcaatcaaatggagtagttaatacacggaatttaaggaatcagatgacataaagtcgaattttttataatcagttaagtaattataaaatatgaattcaatacatctatggtaagaatatcaataaagagtattgatgatgtagatatatttgaaggattatttgtaattggactagatgagagtaataaggatctagattacttgaggaataatactaaattgatggataatttgaatatagacaaagtcattcaggaggaacatttagaaaaaatgaggaaatttggaaaaaatataatcctatacatgaatgatggcgataagttattaaaaataatgttattagggattggagatagtaaaaaacttaatgaagataagtttagacaacttggaggaataatctctcttaaagcaaaggagttaaattttcacaatgtcattataactaatttctattcgagtcccaccaatgttgaatcaataatcgagggcctagtcttatccttgtacgaatttaataaatttaaggaggatagaatagacaaatctctcctaaccttttatgaaaaatattctgcaagcattatcgccccagacgattctaatcttgggaataaaattgaaattggtaagatagtgaatatatgtgaatccgttttttatgctcgagaccttgcaaattctccaccaaatgtgatagatccaaatgctctagctaactcagctaaaactctagaaaaaatgaaaaacattcatgttgacatattaaatcaggaccaaattaaggacttgggtatgaatggcattatatcagttggaaaaggcagtgaaaatgaacccaagttgatcatagtggaatacaataattcaatcacatcaaaagacaaaccaatagttcttgtcggaaaagcagtaacgtttgatactggtggtatatcgatcaaacccagtgataggatggatgaaatgaaatttgataagagcggtgggtgtacagtcttggggataatgaaggcactggggaatttggatctcccaataaatgtagttgctcttatcccggcagtagaaaatatgccttccggatcttcgtatagaccaggggatattattcgaatgtataatggtaagaccgtcgaagttttgaacacggacgctgaaggcagattgatcttggccgatgcattggcttatggtgttgccaaatattctccaaaatatatccttgattttgctaccttaacaggtgcatgcataattgccctaggaacaaacatagctggaattatagggaatgacgataaattgattagtaaattaatatcgctatctcgtatactggggagaaaatctggcaattaccattatccgaggagttttcagatcttataaaaagtaatgttgctactatcaagaacattggtggcagaactggtggaacgattacggctgcagcatttttgtcacattttgtgagtgatgttccatgggctcattttgatatcgctggaactgcatggacccaagatgggactacagacaagagttataaccctaaaggctctactgggtttggaatttgtaccattgtaaagttcctcgaagaacatcaaagcctgtaacatatttctatttttttattatagttaattggataaaagtaaaggtgccagcactgctgtttcccaacggctcacgcacgtcagtatccagcagcgacatcaggtttgacttccgggttcggaatgggaccgggtcggaccctaacgctatggccggctactttttattatatttccgtcaatttaatccttcctatgtcttcaacctgtgaaacaagaattacatatctttcgtcggatggtgaattcgtaggtaatatgtgtctcttgtatatacttacttgaccagatattaagaatgggtacaattaatgataattcacactatcaagtttatgtggtttcaaatttcatttgaaatgaaggttagaattacagggttgtttcctgagataggaaacctgcaagatactcataacaaagtttatttgcaaaaaaagtgttagtttgaatatataccagagttaccattcaatcaagaaaaagattagtggattgttgtctagagggcaatgattctgttaatattcatgctgtgattttgaaaacctgagtatatcaatcctactgtatcaattatggtctttattatttattttctgcttagatcatgatttttttgtgcctttaatagctagtttgatctttatagttaaagaccaaatcattataaagtcttgaaaattcttaaatatcgtcttttgactattttgctccctctaattcacgatttatataaaagatttgtgaatattattataagcaattggataaacatggaaatttgactcatagagttgctgttttagatcaggaattgtgccaaccaagaaagtgtggtctagagtgcataatctattgccctgtaaacaagactggtggagaatgtattattcaaaggcctgatgatgggaaggctgttatttctgaggatttatgtacgggatgtactatttgtattaaaaagtgtccttttgatgctattgtaatagttaatctggcccaggaaattggtgtagataaaatacatcaatatggaatcaatagctttagattgtataaaattcctataccaaaagaaggtactgtaacaggtattgtgggtagaaacggtatgggaaagtctacaataataaatctgctttcaggaaatataaaacccaattttggttactatgataaggaattaagttgggatgaaattttaacaaagttatctaacattgagcttcggaaacactttgaaaaaattcattccaaaacattgcgtacttcaataaaacctcagcttgtatatcttatcccaaaggttttcaaaggtacagtatctgaattactgaaaaaatacgatgaacggggggtttcggatatcttgatagaagagttaggtctaaaatattcactagatagagacctttcaacgctgagtggaggagaattacaaagggtagcagttgctgttgctgctgctaaggatgcagaatattactttttcgatgaaccttcttcttttaatgatatttatcaacgattggctgtgggacgggttataaataatttagctaaagagggtaaaagcgtaatgattgtagaacatgatatgtctttacttgattacttatcagataacatctacctaacttatggagaacccggtgcctatggtatagtatcgtcccttcaaagcactaaagttggtataaataatttcttagaagggtatattcctactgaaaatgttaggttcagagataaagcgtataaatttgatatatcgagtattaccgagactgttctctcatcttctcctatagtggaatatactgcccttaccaaaaaacttggtcaattttctcttactgttgataggggagaaatttatgaaggggaggttgttggaattgttggggcaaatgctttgggtaagaccaccttcatgcgaatgctggctggcatggaaaaaatcgatcaaggtggcttagacactaccataaggatatcctacaagcctcagtatctcaaccaagatattgatggcgatgtacgctctttaatctattctgcaaacactggaccattcgaaggcaccacagtagaagaacacgtcctttctccattaggaatcaaaaagttgtatgacaaatccgtaaagggccttagcgggggtgaattgcaaaaagtggcaatatcattatcattaattaggcaggctgatgtgtacgcgctagatgaaccctctgcatttctcgatatagaagatagaataacatttgcgaaattcatacagagatttactaaatcaaatggcaagtctgcattaattatagaccatgatattcaattgatagatctggtttcggatcgattagttatgttcgaaggtaaccctggtataaaggggactggtacatctcccactaccaaagaaattggtatgaacaactttctcgaatccctctcaatttcatttagaagagatgagacaactggtagacctagagttaacaaagatagcagcaggttggacagacagcaaaaaacagctggcaattactattacttgaagaacaaataggtttattagttgcatcattaaatgagtaaatttttaaaaaaacttctcaaaggcgtattagctgatgaggatctcgaaaaagtttattcttcatttgatatgataggtgatatagctatcattaagatccctgattctctgttagcaaaaaaaaatatcattggagaggttatactagaaagtataaaaaatataaaaactgtttgcttacaaagttcatcggtttctggagaatacaggttacgtgggctagaagtaattgctggatatgagaaatacgttacctactatcgggagtatggttgcaagtttttagttaacgtggccacctcttatttctcacctagattgtctaccgaacgactccgaatttcaaatctggtttctcccggagaaatagtagtaaatatgtttgcaggggtaggaacgttttcagttataatggcaaaaaatcatcaaataaaggtatacaacattgattctaacttggatgcatacattttgagtattatgaattcaaaaataaacaaattaaaggatcgcgtcttttcaatacacggagattcccaggaagtacttcttttaaacagctttaaagagcgtttcgatagagttctactcccattacccgaaagagctcatgagtttatagatgtttccataaattgcttaaaaacctctggagggcatttacatttcttctcacatataaaaagtgataccaaagctggggttgtcccaatttctgaggctcatattcgcaacttattctcaaagtacaactttgaaatagaacatacccaaatagtccgagatgtagctccacgaatttatcaaacagttacggatctctttatttccaaataatcctatctatttagtaagggaatctcactttgcattcgtatttttttcattgactgtaagtgtaactccaatccaccctactataaagaacactacgcccacgattacaaccacagtaaactttagcaacagaatacccaaatctgttgcaaaaagagtataagtataagcagtaaaaaaggagattgctataaaaattaatacgattcccttgattttttcgattccattcataggtttttcattctaaaactcttgtatttaaaccatcgaattaccgtacaaagtatattgtgctatttgtttgtaaataccaaactaggtctttcaattgttttgatgtaattctcctctaacttgtgtaagaattgttctttagttaaattgtcattattaaggaaggaagcaatagaacaaccacctgcaccagcaccttcctttacaaatccttcagagtaagatctcaatccttttttgattgaattttctagaaggaggtcaatgtagaaaataggtacttcatctgaaatgttattcatcaatccaaggatgtctgattttttatcattaattatgtaagaagttgttcctatacagatgttttctcttaactttacattcaacgactttaataaagctaggatacaacacatttgagttcccccggccaagataattttcttcttactggaaatgatttctgcagctaacccaacaactgtgggcattagggggtcccccaggtttgctattgccccaaatgggtcgtttgaacaatctccagttctcatttttgatctcaagagagctttctctactatcttgtttttcaattcattagggttgtctggcatactactactgaccttgctatatccatcaaccccaagagcctgcatgacacccaacgcagttgttgtacctcctggaatactttctcctataattacagtttcatttattttggccagttctttcccaagcaatttacccatatcatagttttttattacattgcctatttctaaacccggttcttgaagtatgttcttgccaaattcggaatcaatattaacataaggtaagttgggtttgattttggatccagattcgactactgatatcgggatatttgataaatccagtgcagtttttgaaattatcgcaggagttggctttccatctggcgttgcaggaatggtgtcaatgcatttacacctaccataataaatatactctgcatcggcggcgggggtatattttaatagctctgtgtttgctccggcaactgtaagaccgggaatagtagaagtttccgtataggatattgccaaaataaaagaagttctgtttgatttaaaagacaataaatcattattgcctctcttagaaggcagactctggataacgtcagtaatcaacaaaattctgtcaaattctattaataataacctttgctagttggaaggaaaagaaaagaaaagaaaagaaaagaagaaaggttgttgtttgtgaaaagcctttccccatccaaacattatatcatttctattccataaagaaggttgggtcggagacggacacaataacaacaacaataacaacaacaacttcaacagctgcagcagccgcaacatcgagaaggggcggcggaaggggaagaggagctgataagggcgcggtggtgggttagtgtccttatgagcccatgaatttaaggaaatcatcctcattcttgaacttgaaaacaaaattggattcaaattctttttttaatgttgatgttttacttgaaccataatgatgaccaggcaggattgtcaaatttccatccaagtttactagtataccgtatatcgagttatacatttcatgtggattacccccgggcaggtctagtctaccacaactacctacgaaaacggtatctccggtaagcattactctgtcatcaattattaggcaaatactatccttagagtggcccggtgtatggattattttgatctttgaatcaccaaattcaataatgtggccatcatctacctcgatgtccttctctaatggtgataacttatgttggatcaccttagccccagtagtattttttacttgttcattaccaaatatgtgatcaaaatgtgaatgtgtgtttaggatatatctattaccaagcgaatttcttttcaggtattcaaagataacttccaagttccaagaaggatccacaataattgtatcgttatttttttcatctacaataatgtatgtgaagtttgccatttctcctaccagaaattgttctaccttcaagtcttatcatacaacccctttttctgtttcaaatggtatgccgatttttttaactattagcctcccaacgacctctggattcttgagtaacccatgttttggtcgatgaaatgttattgttgcgtctgctctaatcgctttatcaataatttttccactgtccggatctaatcctgaagggatatcaactgcgagtataaaagcagttccttttttatcatttattgtttcaatcatttttgaaagaggttcttttatttctcctttgattcctgttccaaatatcccgtccaaaataatatttgactttttaatctcgtcctcaatttcagtaacattgtttgattctaatgtaaattttcttatcgattccattttacttatgatctgccaatttaaaatggattccggggtttttaggtcctcaagagaacataaaaggatcaccgataaattgattctattattagatttatttcgcgcaagaatgtatcctgataggtgacgtattgcaaccaatgcatcaccaccgttatttcccttaccgcaaacggctactatagaattatctagtatgttttctttgaattcatctatcaagaaatctgcaattctagaaccagcattctccatcatcaaagttttcttcatagaataattggattctccgttgttttctatctcgtacatctggcccgaagatatcggctcataccctttttctatggtatagttgcttttcatattcatgaatttacttaccttaaggactttattaataaattttttcctaaaaaatggcctaaaatcttttactgatatgaatgtaatctcttttcttcatgagcttttactttctgatcaagggggtctttatggtcttttgctatgtgaattttataacaatcatcatgaaggatccctaattcacagaattcacaagatgttacaaattctaattccttgaaatcatccttgcaaaaactgcatttctcattgggtaatgactcagttaataacggttttagccatccctctctccataagacgttgaccaataaataaatggtattctgatcccataaatatttgttatacatcaaaaggcataagataattttttagtttaacttttttgattttagtatcataaattgcaaatgtgtctccgttataattgcatttaatcatgggaaatatttttggcttttttttaaaccttatgattttataatactcttttgtttttcttggtaggtattttatctcccccttaactattagtctttgttttctcataaatttaaatgccaaaattatatatctgtcttggtaagcctcaaacatttgtgtaatgagataacatctgacaatttgatcttggggaacataaatgctattactggtagccgtttttgcctctattgataataatatagaatctgcgttatttaccgctacaatgtcgggtaagcctgtactcgatcctcccaatcttcgcgcaatccattctccagaattaagttgcttaaccaaacgatactcaaaattataccctctgctcctgcgaatattggtcatccatttcaacgtttgatttagatgccataaatttttttttatgcattcgtagcaactatttataaccagccaagaaaccctaattatgacttttgatattgattctaccaaattacaggattcgttgaatgaattttcgtcttatctaaaacaagtggaatcaagcagggagaaattaataaaggaaaatagggaaataattgccttgagtagcaaggcaattatattattacatagcggaaagactgctgaagcaactgaactaattaataatgcgttttctttgctttcagaactcaaaaaatatgttatttctgatttggaacgttatttgtggcctgcggaacaagaatacgttgaagctgctattttaaaagagattgttgaaaggaaaaatcattttagcggacatatcgaactgcaggtttcattaaatgcatatgttacagggttgttagattgcattggtgaaatcaagcgaatgatctatgataatcttaggaaggacgattttgagtcatccctgtccttgtttaccattatgcaatccttatatgatttaatatacccgtttgcattctacgacaatattgtctctggggtcagaaagaaactagatgttggcaaacggataattgatgacgttcgtatctctattacggaggaataccggcgaaagagctttctagatcggatcgaccgtgcgtctttcgttaaatgactggttattatggatacctagagcattggagtccaccttctggtcctaacttaaaatatagagtatagggtttaagcgaatttggcgaaagcttcagataaatatctgtttagctctttggaccaatcggggaatccttgtgatgaatcgggataatttctataatgttttactaactcttcattcatctgagaagtgaatttcaagtcttctgcaagtttcttgttaagtgctcctcttatcatcataccaagtttactaacggtgctaaattctggatgctccccattagttatcttatcaatgtccatttttgacagaaagtgcttcatgccatagttaatctgttcgttagtaagttgttggagcattcttctgaatacttccaaaccagcagtcttgtaaccatattcgttaatgaaattcttattgtatttccaaagtccattctctgaaacgtctcctgattctattgcttcaaccagatcttttccagctatagtggctgcaattatagcaggacctatgccaccagcatccagcggctttggcatccatgccgagtctccaaccatcatgtagccattggcaaccatacaatcgttctgcctccttacagaaacctgccatgtgccccattcattgcctaggtcttcctccccaattgctagtcttggatttgatataactggattaactccaacataatcatctattaacttcttcaaatccctctttgttccaatttccttgtttgctttatcaaacagcttttgttggacacccaaaccaatattcactttattatctccttttggaaacacccatccataaccacctggagccaatttttgatctaagtgaataatacaatattcagggtcaaaaaaagtcttgtcttcattacctttattatcaaaatcgtaaatatatctaccagtagattccagatcatttctatcaatccttctttgtatgtgagaattaattggtagatttgttcgcagtactgaagtaacaccggtgcaatcaactattacttttgctgttttcttaaatatttccttagtttttgtattttccccttcaacacctacaataaaattattctcaaccgttagttgtctaatcatgatgttactagctatttcaacacccattttggtcgcctccataatttgcttttgaggtaattgttttctatttaaaatatatccctctccatcaaatgacactcgagtttcatgatccggtgaaaaagcaactactcccttcactggatgttcaatttctgggtaaccccatgatattttgattctatcagtcatgtaatcaacagtatttttgccaactgcatcgccacaaatccaacccgaaagggtcttccttccttgaatgtcgatagagttcctatctagtactaaaaccttcattctttgttttgaataatatgctgcagatgaggctactataagtccagctaaccctccacctgctactatgatgtcataatctgtatttgacaggctcatcttttcctgatattaggtacaggaaaggataattaaagctatgttgtcaatatctgccaaaaaatgaccattattatgtaaaatgaagtaaaaggacaaatgaggattatgagcggccattgatgttaaataacatccttttaagacatgaatatatagaatgtctaacgttttctaccaactaaccttaataccatagatgaatataataaagcaattgatcttttgtcatacctagaaagataaatattagtaatagaggttttgctggtttcttatttatcggttgaggtcaagacatctgtgaccgaatttgacttgctgaaatacttgagtttgataaagattctcctaaggcatttaaaaaatctcaggtattttaatcaagtacgattgattgattttgtgagacagatatcaattgctggcctgaacttaacatggaaatgataccatcttcgaatcttaagaatatgtcaaattgttccttattccatgagatactgattacttggacccaggtcagacgatgatccctacaacagatttaaatagtaatgagtgggtctttgatatgctttgtctgaaaagcctttgaacttctaaaagctcaagtattatggctagattattaatatcgtgacgatagaaatcgaccaattttttcgtaatatcaagtgtgatcactgtaataaaataattgaaaagaaggtaaagtattactttgaccaacctaatgttgttttattatcagttgatgtgtgtagtgattgtagctaccgcataagtttaaaataattctggatcaatgcatctacacatatggcaatcaaaataggattttcaacgcttacattctctagtttgtctggaattttagaacattgtgaacttttcgaatctcccgctatttccatccatttcatttattcctagtcaaaaatggtctataaatgataggttctaactctttactaattacatctcactttacaactaaatccgcctcaaaaatcatgttagatttattaccgctctcgattgtgatgaataattactccggatcactttgaacaagaaaattaatttctaatttcgcacaattatttgatatttaaacctaaacctttctagataagtatgactattcttgtggtagaacccgatgttgacacaaaaatataaaacaaattagtcccttaattattgcatagcgaattggagcgagaaatttacaccgtaaaacccgacctgaaaagaacaaaaatagagtgcattaggtgtggttcgattatgggggagattacggtctgtcatctaaaatgcctaaactgtggagcggaattgacttgttctgataaaggaaatttctggtaaacaccatttagcataatggggattcctgatgatacaatgataatgaaatcaacttgacaatctttttcaatttatcctttatcctaaaatatttttctcttaggttgcgagtaaacacttattgaatgccattttcattcatgtaatcgcgaattgcatcttgtaattgtttttgcatacttgtttcccgcaaagctctcatcaagcaataacctaatcacctgtcttgaccatggatgctgaaatccggaatgtctaaaccatttagaataaattctagattttttaataatcaatgtgaataaaaaaaatctgtactattcaaatgaaaaaaaagttaatccttattattttgacggccaggtaataattagagaaatttataatgaatctaatagtaatgatcaggaagtatattttgtagaattttctactggtgcattgactactattcattttcatgaaactgaacaattcttagttcctgtgtacggaaatggagtgattggtgaaatagagactaacaagtctaattctttgttggattcgacttttgagaatcttaccataagatcacttaatgttggagaaatcgtttcaatcaaaccatatattttccattttcatggtgcttctccgggtcaaaatttttcacatatggcatttagaaagatgtttgaaactagacaaggatctgaaaagactgaaccagaaccagttcatacactaacaaaatgggggtatgaaattatcgctaaagaactcgaatcagacgatcaatctcaaatattaaatgagttgaatagaatttctgaaaaaattcgaaatgccgttcatgcgtgggcaaaggacatgaatctctgacccgataaattatagaaaaaagtgatgtttgaatcaaaaaaatgatggctagttactttcgttttcgttaattgaaagactatcctctaagtcatttactggattgctgatgcttgtatcgctttcaagaattccagtgttattaccctcttccttcaaattcttggactgtttcggtatcgttaggatacatggctgttgtattttgtgcaaacacattaccaatgctaaaactcacaagtattgctgcaaaagtaaaaactgtgacaatgacttttctattttccattgaataaaaaagtattaatgttttataaaagtgtattaaaattattatattatttagaacaggatcagtaaccaaaagagtaatgacgagtttggcttgattcttttactactttgtaagattgttaagccatcctagctttctgaaatagtatagcattatgatcaccgatccaactgaaaatcctgcggtaacgattaatggcataaaatctataaaattgtagctataattcgtgcttcctgggatattgatattcattccataaaaagttccgactactgttactggaattgataatgtaaacaggattgtcaagaaactcaatatcttgttagttttctcactgcttagcatatgatctgtatctttgtatatttcgatggtttcttttgactcatctagtgcttcaagtactttggaaacatgatcattgatgtcattaaaataagaaataagatcttcctcttctaagtcggtagagaattttcttacgtcccttgaaatgatttccaacatgattcttttcagagggactactatacgtcgaagagtagttatttctcgcctcaacatggagatttcttttgccactgccacttggtcatcaaaaactgcatcctcaatatcatccaggttgcctattaccttcatcaatatatgaagtaaatcatctaccagggcgtctaagattgagtgcaaaaggtatcctggagaatttcccattatgttttgtttgttctttccattatctaatttgcaagcctgaaatagctcagagagtggtttcaagtcaccatgatgaatggatattaaaaagtcttttccaatgaataatgagagttggctaaatttaggggaagttttttccttctgggtcgtcggaaattgtaaaataataaaaacatgatcctcgtacctatctattttgggcaactgatttttggacaaacaatcttcaatgtttaattcatgaagtgaatattctttggaaaccaggtccattttttccctggtcggctgttcgatatatacccattccaatcctctacttgccagtgaatccaacccatgaaatcgattagataacttcatcctacataacccttgttagtctcatttaatttcaataactccctactaattaatctactatggacccaagttctaatttcaatatatgattattttttaggtggaaaatccttcaaattatcggacttgcacctgtggcaattcggtgactccgatgaggcaagataattaatgtaatagcaatttgcacattgctttcgtacaaactttgatattagcatgattgcgccagagtcttccttgatgactaaaacatttctatgatggagatcagttataacgatattaaataatttgattatctcttccatgttccatgttttatatttgagataattttctttcatgaaacagcagatttcgctagtatcaaatatgctcttaaagtcattatctttcctattgtttattcgaaagaaataatctcgcagataccattcaaattcgaatgacagaatttcagtattcaagttctttttttaataaatattattattttttaatcctttcgatttaataatacatagtaatcaaagcaaatcttaatttatcaactgatcgatggatcggctgatttatgttgttgatggcggatctgcaaattgcatagaaattactttctttaactttgtaaggttataacccagttgagctgaaactgggatgatttgatcaatgttttcagttacatttagctctttcatcttgtccttaattttattgttttttaccatgtctattttgttaagtactagtatacatttttgaaatggaatttgcaattttgataagatttccagggaactcatcaattttttcttgataatgggaacatcatcagcaaaatcaattatcagcaaaattacattagcataattcagttcagataatgtagacttgaaggcttcaatcatgtacgggggtaacttactaatgaaccctattgtatctgatacaagaactttcctcccttcaatctcagaagaacgtgtaaaggtcgtcaatgttgtaaaaagtttcgtacttgtctctttattctcgttagttagaatgttaaacaacgatgttttacccgccgaagtataaccggttaacgatatcaatggaatgctatttgagagcctttggaccctgtggagagctctttttctctcttctgcctgtagttttttcttcaataacgcggatctcctcttaatgtccaaaatgtgcacatcagcatcgtattttcctaatccataaaatccgggctgctcccctaactttgcaagttttgccttttctttcactcggacaatatcatattttagttgtgctaactttacttgaatctttgattcatttgttacggctctatttagaaaaatttctagaatcaatttttctctgtccacaatgtctattttgcacaatcttgcaagattgtattgttgacttggttttagtatctcatcaaatatgattacatcaggttttagtgctgcaactctttctttgatctcttctgccttcccctttccaacaccaaatctagaacgggtaatgtttttttggctaatcacttctaggatggaatacccaattgattcagcaaggcctttcgcctcggatagggcaaattggtttggatatgtgattaatatcgctttcctatcctctgaatacattaattttaaattttctattcaaagtatccaatttaaaccatcagcttatgcgaccaccatccatttggaactttgacgagatttatttgataaagttaaataatttgtcttaaatatcatatactgtttgcaattagcattaaggagagttaacggctatttaatccgaagatgtgcttacgaggatttaaattcagtaatcagcattaatttaaagactcttccggaacattataccgagtatttttttgagtctctcttacgcgaaattccagaagcattcatcatagctgaaattaataatatggtagtgggctatataatgtgcaaattagagtttggcttctcgaattttaggaaactcgggttcgtgaaaaagggacatgttgtatccatagcattgttgcaagagcacagaggaaaaaatatcggtgaggcattgatgatggagggaattaacgggatatcaacaagaaaaggtgacgagatatatttggaagttcgtactagcaacggtcctgctatctcgttataccaaaaactcgggtttcaaatcaaatcagtattaaaatcttattatagagatggggaagatgccaatttaatggccctagaaatatcataaagtcaacaaactattacaattatcttgtatcaaaatatgaaataaatatatggtattttgctatatcagtatgaatatttttgagccctccaccttattagctgttttcccatatgttttcatctcctcttttccaatatttggaataatattggttacatattggctggtaaaggataaagagatcaaaaatcagaaaaaattgatttagtaacaactgttatgtttgaagttcttttctcataataatacctttaattggtataattatagaatttttgtcatattctgcactgacttgaattcttgaatttattatcttactcattatgatggtagtctgaccttcaataatccagcatccaatagagatattattgttattcaccatagagaatctcttttcaaatcagtcaatcaaaaccttgtgagggaaaatatgtgaatacaaaggggtggcagaagaatcttatcaaaacatttcttttaaaagtgctatttggagacaataaaaccaatcaagaacatctgataagaatcttctatcattttgaagaaacgattattatttgacaaatgagtatatttttttttatcctgtatttaatctaactagactattagagacattgaaatcagtttgctgataaagggaagagaaaggggtaaaacaaagtatcgggataagtgtcaaatcttctacctaattgtaaagagttgcatagggaaatatcaaaccaagaataaactaagttattacagttcatataaaagattgaatgattatttggcagacttgatacgtttgaatttattattgtttgatgagaaaaaacaaagattcatagcgactcccaagggaaatgactttgtaaggaaatatgataatatcatagaatatatcccaactttcaagagagattatgaaatctagtgcctaccactgatgccatggtgggtagcccctttaattcatatccgattggtttatattttattaatttttctacctttggtcactcagtggttcaaattttctattttcatatggcaatctaatggactgaatattgtcatttactttatttttatttcaaaattctgagctaatatatttatgttctataaggtgatcgtatttttctataattgtttaaacatgatattgttgactgaccagtcagtaatatttatatgacttgtttgctaggtagatatatggaaccgatccattccccatcgaccactgctcttaaattttctagggttgtgttgatgtttgcatctgttggttccttaatgcaaataagtgctggtaattgggatgtcacttcacatttattgtcaagccctgaatcgttttttacaccttctcatgccttactttacactagcataggcattttatcactttcttccatcattggagctatcctaatgttaaaatttggagaattaaagaggcacggtttaactctatcattcaaattacttattataggatcaataatttcaattatatcgggcccaagtgattttatttggcaccaaaccttcggtgtcgatggatttctgagtccaacacatctgatgttaattacaggaatgctaatcaattccttagctgtagtaatcgggctggttcgtttaacttcatttgtcaagaccggcgccttttatcaaattgggaggattctcatagtccctgctctaattgcagtatggctaaatttgataacttatgtttacatgcttgctttgccaatttctgatggcgaactgtttaactttaatctaaacccaatagcagaatcgttaatggcgttagtattattgccattgattaattcaggactgttcctatttgttttgaggaaaacccatacattcgggttcgctagcgccatagcaacaggagcaattttattgaccgcatttacaaatatactaccctctcaagcactctcgaatttactccctttttacctattatcaattattccatttgtattagtcgacatgctagtttacgacaaattgcccttgggcaatagaataattagcaataaactcaaattcgcaatagccggtgctatttctggttcgcttttttatgttgtcggatatcctcttcttcctctgacactgtctaattacctgatgcctgtggatttggagcagaccggatttgtaactattgttgatataattccaagttttcaaagttctttacacgtggtattgccaataaccattattatcggtgctattctggggatactatcttcccggatttacgaaagaatcgatggtttcaaggaaaaaaattcaaaatctgatgaagtgatttttgaataatgtgcgcaaaagttactttacaacacaagttagaaattcgagatcggatcattgccgctgcactaatttctttttctaaaaaagggtttgataaaacaagaatggacgatatagctttagagtcaaatgtgagcaagggaactctctatatctattttgagagtaaagaggaccttttttatgcattgtgtgaaaagaacttggttgatctaagaaaacaattattttcattattcgataccaatgatgaattcaataatacaaagaatcaaaaattaatttccgatacaaaagaatattacaataattttagtcattttgaaaatagttacataatttttctagaaatcttgtcaaaatccacacggaatgcaaaattaagatcaatactatattctcaacacaaacagatttttggggtcatgaaagaacatatccttagctacctcaagaatgaccaaaaaatcaccattatagaagatcatgagattgattgcattgttatgagcctaattgcagtttacaacggcctaatgatgaataggctactcggagtagaagaggaagcaaacaaaaagacatgggttgacagcgtaagcaggattctcgggactaccgtaaaggtacaataaactttcagtacagtctcttgtttatactctacaccattttactaatgtctttttacctatctgagggaggctttttcgcatttgatagatatcttgataatgtcttactgagaattaacacaaaatagaatttcattaaactaccaaaaattgaagtaactgtcggttatggggacgattgcaagtgatatcaatatggtgagagcagtcttctaaagagaccagatatatttcaattcattattatattaaaagaatttctaagatacgtctttttgttaattctttttttttaaaaaagtacttgaagttaattgttcacatattcaattgcaattgattcgtcatagtttgataatttcaatctctttatcaatatttcaaggctgcaatcattatctatttggattttgtctttaaccgctacatattgattgctaaaatctctcttcaatccatcataattagaataaaaccattcaaaattgtcccttaatttttcaaattttacgaatgcttcatcatttaaggaagattcaagactcatcttacatgactaagaatattatggtaaattctttcataaaaatgttatgatattttttattggtaacattatggctttctccgtaagcaattatttcggcaaaaatcagtaagcaaggttgaaaataccaactggaatatgttaaagcgcatcctaaggagggaattcatattgtatttttagttcatttgacttcgaaaacttgcatgattctcgagaatagttggtagttagcacctctgtctgtattccattaaaaataaagttcaatctgcagaggtttaatctcttacttggcaacgacaatgttaataatttcttctacgcatacacagaaatttgttaacctgtcatgataccttggggttttcttataaatattttagcaataaagatttgtataaaagtataataataatcttctttaaagtaacgaataacaaaatcctctgaggtatacattcatactagcaaaaaattctttgccaatttccatatcaattagcatgtattaatttagaaagttttgaatgcattctttacaaataaagatatgctgctctagattctggaatttcgatcctttgacggtaataaatatctatgatttgatattagctaactaatggtttctcttgtaatgttattattagattggcgtttattttgttttagtgaagggattcctatctgtggaaagattaaaaggtctgagtgattctgttcttttggtcgccttaacgatacttgcgtataatcttatccctcctaacttagtagatggtcaagcagatccaacagagcttgacagtttctatgatacactatatggcatggtgtctagtttttttgtaatttttgtattttggatgctatatatgaagatacttgatcgtctcacagtgcctgatgacatagtaatattgacttcgttggtattttttttatttatactagtaataccggtgtttactctggcacaagtacagtacgaaagtgcttcagcagtagtttttctatcactactaatgattcttactgatttgatcttaattttcttatggaagtacatgcacaataaatcactgagtgttgcccagggagatagggaattaagaagcattcataatatgttttttgtaattccgactctttacatcatatccattctgttaaccttttatagcatcaaactttcaataatattaccaattgtaatgattccaactttattattgttgaagggtctcttcggtaagattgataggtaatagaggtatccatttcccagataataaatggaatatggaattttaattaaagatatggcagataggaccgatcttaacgttgagataagttaatatccttatagtatagataccaaaaaaggaagaataattacactaataagaacatcctactaaataagattggctaaattactgtattaggagaaaccagatgcaacaagattaggggctagtctaatcacatttgaatatgatgttttgttctttaattaagaatttaatgggggtagagtactcaggcaataaatgagaatattgtaattatggcaatgatataattcctggtttgtttgagaagttaatgtctgctataaatgtagcagtagtattactcacttttagttgtaaatatttgatcactaccctacttcaatacaatgctaacattctattgaataacacacccaggtgagggccggatgcttacttgatggatattgaatactgggtatatctaattatctacgacctccaaggccgccatgttcacctccgccattctgtggtgaaaagcctccgccatagtgttcatgtgtaactccggtgtgatggacaaatgtcccactatcacttggttgcacatgattaccaatattgtatatcgcatagtggctgtgagtaccactagattgattatcataggcggttctgctatctattctattatcatgaatcaccttgttaccattatcatcataatgcaatttctggttatgattgttatctacataatagtacttacgaccatcattatcgtaccaatagtggtgaccttgagcattggtataatagttattaccattttgatccttgtagtagttattaccactgtcatcagtgtaataatagttgtcacctccatcggagttgtcgttatcttcatcgtagtaaattggtagaccataataatcataatcatctacaatggtcttattaacaatgtttggtactgtagtattttgtcccaaaactcttgtagatgttcctaacataggtactgttacaagaaaaattacagcaatggatgtaaatccaaactggttacctaaaatagatcttttatcattcatcaccgtcacatgctataaattatataaagatattgagatacaactgaatcagctttgtagtacagttcacgctagtgattacagcttgaaacgtgaagttggagatcgtattagctgaaatcatatcataacactcacaaatgctgttttggcattagttatgaccctgttaatattgaaaattgttgtacctgatctatctagtccagaagcttaaaatgagcttccaaaacgattaattgaattggggatggatatttggagctaagcaactagtttcatagtcttaggtttttggattgctcatgaggatcaatttcactacatcaaacgtgcgattcgaatcctcttctggataactatcttttatttaacgttcatagtattcatgccattttctaattctaattagaaaatatgaagatcaacagatctcatcgtcatatatggaatctatattatgataattctaatttgggcatacttgcaatggaagtacgctacaaaagaacatcgtttagtagatagcattctcgaacccaaattcaaaacaatagtgtcaagaagagtaattgtaggattaatactatgctcgatagcgattgctatttcatttctaaatactcaaatatttattatattatttgcattgatttctatatattatctcatacctctgaaatatttttggcttcgatttactaaatataggtaaaaactatcatgtcagatttatctggccttatcatcatgatattagatcgacagcacttgagaatgactcgatgttacatggcctggagtttgtatgcttgtttttttagattatggaaaaagattgcatgctaatcaagctttagtttgaatataccctactttcatatctggttcttgggtaccactctttgtcagttctgataaatccaagatttatctgaatgtgttggcaattctcaaaccatatccatcataatgatgatggatgtttctttataggtcactacggttaagttccataactgattaagcaagaaagataatgctacctactagctatatctgccattgcatcaaccaaagtcaacgtcactaagatccatagtatttctataaccactttctctcaagtgcttaattgttctaggtgaaaagtcaaatatcttatttgatatcgtgttctcatcatttttgcggtttattcttacaactttttctatttcaaattgtcctattagcatgtccgagtattttctaggtttgattgcttggccgtggttcattgtatttttattcaataaattattgatgacatcatcttttgcaccagcatcttttgcaatcttgatcaattcccttgccagatccacatagtctgatacaagcaacaaagcctgttgctctcgtcctgttctgtctgaataggttatgtcactatttctgttcataacaccatcatgatccaaaggaattgtgtcttgtttaactggatgaacattgacgatacctatccctaatcttggaactgaatctttcaaaccttttacttttagccaataaagacggtgcagtctaacaagttgtgttaagggagtgttactcattattcctccatcccaaaagtagcgcacattcttttcataattagcgctattgctattgtaactttctacttctaagggagtataactataattgataggcaccgaggcgcttgcaataacatgatctgaagtaattccgtcgttatatctaataacatgttcatgtctaacttcttttccatcatgagtaatatattttccatatccagattttctggagccatcttccgtttcataactatcaaatgttacaggggccccttctgctacgtcaacactcacgaggatgagtcttggttgaggtaatgatgatttctcatcgaaacttgttgcgatagggaattttgcgaatctctctaaacttctctttagcggtccactgtcaaaacgataccatacatttagaggatcaaaaaacctagtatcacctagcggggctaaaggggagaagactgtaggtactcctgtaatcacagatagctttgatgaataatatcttcttgcagcttcaccagaagcaaaaccggggtgaatatagttatgtagaaaatcccaccaagcagtaaaacccggaatacggtctagtggtgattcctttgacaaatactcccaaaactcatttagcctttctgaagagccttcccacgtattattttctgtcacatagcttacaagtattgcagcatttagcgcacctattgatgttccagcgacaatatttaagaatggtttatctttttctcctttttccttgtctgctttggtaaccttttcatatagtgcttggtaggctcctgcttcatatgcaccaagtgagcctccaccctgtaagactaatgctctttggttatcctgatatatacccatatgaactgagtttggataggatgttattatgttgatctattactgacagaccttgcgatagtatgctgaagatacatgaccgagcctatcgagattgtagtacgttttccatgattcttgtacgtataagttgggactcactttcattaaagcgaaatccaaatcctaaaacccccaacaatgctgttactaaaataaaaattttgaaaaagtaaaaattaaattcgaggatcgagtgagatttgtgtaatttattattttcgaaagttaggtctacctttgattactatttcatttaatctgacatttcaaagcatatccatatcttcggattttaaatcgggactttacccaatatcctgattcttatgccagtgaagtattggactctattccaccttgaatcatattttcacaatccatttttgtggttatcataatcgtgaatcgaaaatgagtgaatgaacagtccaattaataaataacaatatttatataattattaagtaaaaaattagactgtatatgactgcaaatgaaaaattcaaaaacatatatgaaaatgcatatcttcagcagaaacaagcgatcggatcaaattatacccagttcaaaagcatgattgaaaccacatatcttcagcatatacaagcgatcgaattaagttatacccagttcaaaagcatgattgaaaccgcatatcatcaacaaatacaaattatcaaaacgaatgcttctataatgaaaacctattatagcatgtttggaaatagcgagatagtaaaaaatattgaaaagatggaatctgattttttaattctaaatgaggaatcaaaaaaatcaatgctcagccagttggacctcattaaagataattacctctctaatgctgctagattaaatgaagaatatcataagatacctaacattgataagtttattcccaatcctgatggctcagtacagtccgatggcaatttaaagaaataatattagctggatagtttatttcgctcttcatttcataggttagcaggttcataatgaaaagaataaatctttttttgcacatgtagcattctactttaaaacaactctattacatgccaagttaacccaattttcattaggaaccatattccaatttaaggttttggcacctgaaccgtttgaatgtgaagtggtcttgtttgaaaccctcttgattaaggtgttatcgaccactaatcattttatcagtgttgcctattacattaattcttaagaaatatctgattttggaacaacgttcgaactccggcccctgtcctaccattttttttaatattgtattacgatatctgttaattcaaatccagtttggggtagcaaatattcaaaaatcaaaaggtttagcatctattgatacaaagaaactctaataattgtctccttgagtaaggcgccgggagaaggattgtacttaattatgtacctaatcatgggaacaatatgtgctcaattgatgacatatcggtaagaaatttcaaagaatatttaactaaacagaaacagagtcctcataccattagaaacaagatccaatatgcaaagagattttattatgttttgcaagaggaaaacgctcaagatttgatgtctgtatctccggaaactagacaatatgttatgaatcattatcatctttgtcaaagtatgtgggaatctatgaccgatggcaaactttaatcaagagatttcagttgaaatggccaaagagggaagcgtatgctgtatttaaagaaatttttaatgattctaatgaatcttttgctgccatgttgaaatgggtgaaggaatctgtttctatcctgcctggaactgtagggaatgttatcctcttcaataccttgacggggctgcggcccgatgaggggtacaaagcaatggatctcatcaggaccgatgaaactgcatatatcgatagaaagaggattctcctaatgcgctttacatacccgaaactctttcttcgagtctccaagaatgcatatgtaagtactatgaacgatgatatattacaaatagctcagaaagctgaatcgattacttcttatgcttttattagaagcacgttcggaaactactctgtttcgatgaatatgtactactgcagaaaagtctttgcaacatatttgagaaatgagggcgtcgaatctgaaataatagatctgttgcagggacagatatctagttctgtttttgtcaggcactattaacgaccagacctctcaaagtttgaccagatcagacaaaagttaactaaactacatgatttgattgttaattgacagtaccggtagtgactcaagtgacactattttttattcccttgacatcacagtttaggattggaggggcccttgattatgcactaatgttaatcatgatctaattagttttgtttcctttgttgttgttgtcaaattaagtagatttggttttgatgttagagaggaaggggaaggttcatttgttttagtatcatttgtgtcactaacatttcatggggatcagacccaaaaagccacaaactataaatacttagtagaaattttgtataaaaaaaagtaccataatattattaagcatattatgagaactaaacgcgacggcatacattacttcctcaaaggtcttgcaccccacaaggtgtgaggccttgtcaatagtcgaaatttttgtagtaacgtaatatttttagaaggtgtttttttgcactcctgaaccaatgctgtaagaaaaaatacccctttgtccttctaactatggtatctataacgctgatagtattttttctaacagactggccttttacgttaaaacgcggtttttgaaatgacattttgctattgaactattgacgacggtaactatgtgtttgaccatgttaatatattacaccgccttggtcttggcacttgccaaacgatggccttgttataccgagtgtaattgatagttttagatattctattttataaaacatcctctattgtccagattgtggcagcagcttgtaggttgttgagcattccgggcgtcctatgggaccagccgatagcatcatgaccagaatgatataatttgttatcttgcccttcttaagattcattccgtagacgactttaggataaaaaaagattataaatgttatagtagatttaacttgtgaatgtctgagtcagcattcctagaatctagtcatgcatttgtcgataaacttttggatctagataatgaactgaaagccaggatttgtgaaaaagataaaagtgctgatgaaatctatcagccgtattttgagagattgtcattatatgaagaatcatcaatcctaccttttaatgaaagcgacaaggtattattgcagaataagaaggaagacatctatttagagttgaagttgttcaagtttaagcaagatatgaaagaacaattagatgacatacagactcacctaaatgatctacagaaaaccttgtgaatttaggtaaacgaacaactatgaatctgaaaaggtgactttccttagtaacagcgcatcctccatttgactggatactattgcatggggttgtatcataatgttttttccagttattctgcaaaccgattaggtcagctgtaagcaaaaataccccttagcgaatagtatctaactcagtaaagatttattactagcattcaatccagatgctacattttcaatcttgtgtttttcctagtttggtatcaatttcaattaaatatctttgctaacaacgattcaactctaaacccgttttcttgaaaatttagtataagaaaaccttttagaattgcatttatatatattatatattgatacaaagcatcgatcgatactattatattaaattcagcagtgtaaatagaaaaaaagtacaacatgctttcaatattcttgcaattttcacaattatatctactcttgttctgggctctgccacttcaagctggaatgtgtatggccaattaaatgaaactgattcgtcaacagaaaacgaaattcaatctattccacagaccactcaagaagagatcactgaaagggcaaatgagcaaactacatcagaaactggttctgaagaaaatagttccggtattataaatgatgaacaaaacatagccggcggttcaaatacactgagtggatcttctaatatacaacctgatggggattgtttgtttgacccatcattacccaaatgtgctcctgatgaaaatggtaattgtcctgaaggctttaatatgaatgaggatggtcagtgttttccacaacatgatggttgtcctgatggatatcatagtgtagatgatgatgaaacaggacgctgcatttcaaattccgagggctgtccatctgggatgatttttagacctgacatgaaaacatgcggatataaagaagatgtgtgcaaaacatatcctaaccttgcagactgcaaagtagatgatggtggaaacggtggatcgaatactcttgcttacaattcgggatatacctatggttgttctgatgcaaaaatcgatgatccttctgagagatacataaatcaagcaggcaagggccccagctttcacacatcagaattcatgagcggatacagtgatggatttgaaatatgttctaatggaagcaaccagccgccatctaattcaaaatgaactttcaaaggcattgttgaagttacaaaccagtcaccgatggatacatacggtggaatcacagtaaacgtgggcaattatcctgacaatatcttcaaaccggagtatgatatctatttcccagcgggccaatctgtttcaaagacatttacatttaaatcaagcgatgttcctgtggggactgaatttggggtaaatcttgactatggtgatgactataatcagtacatatttgggattaacactcctgcaaagaaacccgagttggttcaattctttatctcttaactaattatcgcctttttagtctattaagaggaacaaattctgtttttataattagagctcgctatttttagaacgattttccaaatgtgatttgataacacaagagttgaccaaactacataattactagcaagaggatgtgatatcgtttctaaagagaatgggtgtgattacctccaggccttttaattgagttgaatgatgtatgtctaagggtaccggaggtgtaactttcttccaactttcgtgcaatctggtttcaacagtgctgtaagaaaatttaccccttagtcctctatttagttaaacatcttgccaaagtatttatcatcttttttacaattttgggaacataaaggcataaaaaatctgtcgaccctttcatgagagttttggcgacggaacgtctttaccataacttttgacattttcatgttgacaaattagatattgagtagagttcgaaatgtggccccaacaatgtcataaaccttgaaccctcagttagagttaatcgataaagtctaatccattgacatcggttttaacttttttctctgaaatctttttaattccgtttatcagtttttgattctgcaagacaagactaaaaagaaaaagaacagaaatggtagattctgaaactttatcgattagcgtcttggccgccctttcatccaaactattacaacaattaactaacatgtttagtaactgttctctatcatctttttgaagggcgtatagcaaaccgcgccacctttcacaggttttatcaaacaatgtttttgctaaaggtttctctctatccaatacaaccaatttctgatttatggaatcctcagtgacattaacctcctctttacaaaacttcaagagtgttttatatttatggaacaaagcacccatcataataggctcaattgggattggtctgttagaattagagagatattgtgtatacaatttggcgttttcaaatatcgtgttaaaggcttctttctctttcttggatgatagttctttcttaaattcggaccaattcaaccgctcgatttcaatcaaatatctaaatgaaggaatacttcgacccatttgatttgcatatgtcatactaagatttatctactacgcagtgtaattatgcgtattgaggactagacaattcatatattcacatcgtcaaattacagaatacaaattatcatttacctaaaagagcaaaaatgttaagttactatatgtcagaacctgatttatctagtgcaaactctaaagcccggatctccacttgtaactctgctgtacaatattcctcagtattacaaaacattttagcttcgtagagttttgcttgcagtgctttctttgtcttcgtaataaccataggtgaacatagttttttagatagaaacgaatggctatctctttttatgttttagtactcggcatattcgtctatggccttttgagtcaagtaaatggagtcagcgtcatctggatctacaaatatgtagccaatactaatcaagttatctctgacatgttgtctcagctccaaatctgactcttccttgttgtacctgcccctcgtcttctgcaggcgtcattatagatatcaacaaactttactgatactttcaattctttgttagtactttcaattaaaactttgacagatgttaagggtcagactttgtaccttctcagaaatatcttgttgttccaattatattgatatgataaaattccttataagatactaacatggttgttcaatctcaaggaaattcgaaaaaggttaacagaggaacacaaatacgtttgattaaatagaaaaagcttaattctatatcttccatagacaactaatattactatgttatcaaaagcagtgattctctatcttcaaggtcaaaaacaagtttctcaatcctatgaaagaaagttaaagtgcttgatcagaaagaagatggcggttttgcaaaaagaacttcccttgctgtcaaaactatttggcgacggtgttaattcttttatggacatttcaactactacaaaactggccgccccaagtgctaaagacaaaagaagttttaacccgtctagtcagccattgactcctaacaacagcgctaccaaatttagtaatctgcaaaaaaatgaatccatatttgaaaatgagaagctcgtggcccgtgagggtgtcgagggttcaatgagctcttccaatgaccatccatcattcaacgctacgaaattcagtaatatacagaccaaatgcgctacgaaaaacaatttcgacgagaaaaggcgccgggagagggatttgaaccctcgaggccctcacgggccacaagctatatagtttcctaatttccaggcttgcgcccttccaggctaggcgaccccggcttttgattaaatgataattgtcctctttttatgtatatctaatattaatttatattttaaaactaactcatctctatcctgtcgatcatccgaccggacaacaaatcaaatttataaatctttgaatggccggtgctactcttatgatcttgaacatccgaataaaatagaaaattttgattacattgagtacatacccaaacaatatttagatctttgtcattcatgtctttgtctaagcatacgattcaaacatacgatataagcagtttgaaaacaaataatgttaatttattttgattattctttagtaaaaatatctccaattattataacgataaactgtaaataactattttaatacggcgctgttcagagtgtttattacatgatatttctatgtattaatcaaactctcttgacatcctttataaaggattgccataaattataaagtacattttttggatagattaataattgtggaaaattctccacattcttacaccatgataaccactaaatgatcatgccgctttactttgagatcagatttgttcctttgtgaagcaaaaacaaatcctatcataactaaatatatgtatcattactcaatataaggattagttcatggaatggtttattacaaatttttcttgtctaaatatttgatattgttagtgtaaatttaatactttaaaaaattttaggtcacataggatttctttgacgcggtcctgaggaacttacatttgcatcattcaaccatatatcgaaactaaaaaagtagaaatcaatttcatctcaaagttatatgactaaattcaaatttttgtaatctgtctttaaaacattctgattatctggaatctaaatagattaatttaacttggatttattctataatcttttaacagattaaatgacaatacgtcatagatttcatacaggttaatttatttcgctagaaatagcatacttttaaatgaacgcatttcatcggacattataagagtatgaatagggttaacgaaccagttgtggccttgcttcctcatttgttcttacccctaggattatgtccgcaattaggttgtaactaaaagttatttttgatttagagttgtcattattataaatttatccacgttacaatgactcattaattcaatacaacataaaatatggatatggattcagaatatacattctccaaacattgtaaatggactcctttcagttcgtttggttacaaatcgtgctgtttagcgtggatctttaaatgattaacttataaatttcagacctacaagattatccacattggttctaaaattaggtgttcatgtgtctattagtggtggtatttcaaattcagttgataacgcactaaaaattggatgttcagcttttcagatatttacaagaagtcctagacagtggaagactaaggaactgactttatctgaaaccgaaatgttcaaggaaaaattgggtaatagttcaattgatcctgaatccgttgttgtacatatgccatacttgcctaatctgtcggcacctaccagtgaaatgtatgaaaaatcaatattagtattgacagatgaaataacacgttgcaatatgttgggcataccttatcttgttatacatctgggaagtcatctaggtcaaggaactaaaaaagggataaaccaacttgtaaatgggtgtacaaaatcattacaatcatacagtgacctgggcttaccaagtaacagagttaaaatccttttggaaaatagtgcgggacaaaaaaatagtattggaagccaaatcgaggaaatccaaagcatattcaacattcttgggaaaactgattatgggttgtgcatagacacttgccatttatttgccgcaggctatgatttatcaactgaaagtggtgtttcaaccctttttgagaaaatagatagccaaattggtatagaaaccataaaaataattcatttaaacgattcaaaaggagatttgggatctaaccttgatagacactatcacgttggtttaggaaaaattggaggaaatggcttaagatatatagtaaattataagaaattaaacaaggtcccattcattatggaaacgcctattgactcggttagaaatgatcttgataacattggattcgtaagaaatgtcctgggaaattgatcgtaattgataatcatgattgctgtaattttgctttcatattcataagataaaatacatgactattgaggatggctcatttttgttaaacaactatatggattactcattctatttgatcaaattaagaagctttattatacaaaaatacttttccatgatcaaaaacgtagcgaatattaggattatttcatttatgcaatatatttgtaattgattttagggttataatttaattttagaattctaatacgactttacatctgcaataaatcatatactgttcaatattgtaattattggtaaaattttggatttcaatataaaaatattacatcgtgtatgtgaataaaatatagtttaaatagcatggtaccgatattatatataccagacccattaacaagctccactgaaagaaggtagtaaaggcaaagtctattggtatgcatactaggtaaatcccagtttagtgctgatgttcatgccttgtaagaaatgatcaaccattttaagaactgttaccctttgcagagcctttattaccttttaaaaatataattcaactcatactaatttacaaatttgattagagatttttcaaaaaatattttttcgctgtctgcaaatcaatataattatcaggattcttttagttttaatccttaatagcttggtttcgaaatttacatttcttgaattaatagttagctcttgattaaaagtaagatgttaagagtcgctgatcagctattaaaaatcaagttttcaaggatgtttgatacagattctctattactattaaacttattaatcaagatagttaaccagatttatgatacgaataaaggagggaaaacctaactcggacctatctgagaaagtatttcttgtgcttgacaatcatagcgaaataatttacgattcttatcctgttgttattaaaccacctaacatgaaccatcttatgtacaaggcgtcaattatggaaaaacaaataaagcaatggtagtgatttcggttaattcttattaaaagatgtatatatcaatcatgtcatcatagtacagggtagatacatggtctctcaatcttatgagaataaattcggtataaaattatcggatgatcaacgaatcagcaatcttgatagtaatggattgatcaaaactgaggagttagtgcaaaaaattccgttatataacgaaaagcttgacgttaccaaaaaaagtgagaatggcaacttgaaaattgaaaagaaatggatcacagtgaagaaggaaatcgagattcctttaaaatatgaagagattttcataaacgacaaagtttttgattcttatagtgacaaggagaaaggtgaaattttcttccaaataaaaagcaagatatctgatgcatttctacgagaaagaactgatgagaaggacaacaaacagcctgatccaactggtagcgaggtagaaattgtttgctgggaacccgaaggaatggaattgaacaagaatgtaataagtgaaaaagctatttcgctttcatatgttacattgagcgatcaaacaaacatccaacaggccgatcaaacaaacatccaacaggccgaccaaacaaacatccaacaggcggccgaccaaacaaacatccaacaggcggccgaccaaacaaacatccaacaggcggccgaccaaacaaacatccaacaggcggccgatcaaacaaacatccaacaggcggccgaccaaacaaacatccaacaggcggccgatcaaacaaacatccaacaggcggccgaccaaacaaacatccaacaggcggccgatcaaacaaacatccaacaggcggccgaccaaacaaacatccaacaggcggccgaccaaacaaagactcaagagacttttgaactatggggtgaagaaattattatagataagaaaatggttaaactagccgagattgttatcaaaaagtatcaagtgaacgaaaaacggaaaatcgatgtagaggtcaatcgagaaaaacttaccttaaaatttcctggcaatttcaaagaagagatatcctaattcagaatttattttattggtgatggttaaaatctcaatccatattattttatatatcttcctataagtataatttgtgcgtgttagtaacaataaggataatatagattggaaaaatgttattaaaaaagaggtaattggcaccgacggtttggatttgggggaagtggtagaaactggcgataatttcattgtgatacagaaggggctatttaacaagagaaggttcgtaataccaaaatcaactgctgaaagttttgatggagatatactccgtgttaaagtaaacgaaaaagagttaacgggatatgaggaaacagccgaccctgcattcaaggactattctaaatttaaatcatcggatatgtccaaagaaatggagactagaattcctgtaataggggagaatctgcaagtttcaaaaaaggttgtcgaggataaggtcgatatcatcaaggaacctgttaaagaaacaaaaaccgttgagatagatttgacgtatgaaaaagttactattgaacgtataccatttaacagtgaggagactggaatagaaaaatctcctgaccaaaaccaaggactagggggatctgatattgaaaggccagcagcttctcaaactcaatctcttcctgaccaaaaccaaggactagggggatctgatattgaaaggccagcagcttctcaaactcaatctcttcctgaccaaaaccaaggactagggggatctgatattgaaaggccagcagcttctcaaactcaatctcttcctgaccaaaaccaaggactagggggatctgatattgaaaggccggtatcttctagaactcaaatttccattccgctcaaaagagaggttccgatagtaatcaagaatccgtatgttagggaagaagtagtcataagaaaaaagccagtgaaggaaaccaaaataattacttcagatgtgacaaatgaggaggttacttttgaggacaaatccaatcgcgatctgacataaaattcgattatacttatttattgagataactaattttaagaggttcaattatctgatattgaataaaactgcatttgtttgaagatgcgagaaccatttttattgggcatcaccaagactagattgaatatatggcttttgattaataagagtaatatacacattcattttttctcgtttcattttgatctaatttcatactatgcattaaattactcaatatcattaaaatctcattattgaataatttttattgcaatctaacttattttatattacatttttcatgaaaaaattgcaaataaaatattttttgcccacaaatagatttaaggatctgaattttcatatatgattaattatcgatgaatacctatgatgaaataatacagctagcgctagagagaggattttattttccaagcagtgaattatattctgatgcaaatgctggattttgggagtatggacccaatggtgtaagaatgaagaataagttcttagaactatggagaagagaattagttcgaagagacaacatgcttgaaatagatggatcacaaataatgagcaaaaaagtattcatggcttcaggtcacctgacaaatttcactgatcctatagttaaatgtaagaaatgtttaagctcgtttagggcagacaagctgatacaagaggtagtcaaaatagatgtaccagaacgaatggaaaatgaaaacgttgatgaactaattctaaagaacaatattaaatgtccactttgtaagggagaaatctctaaatctgaacgatttaatatgatgtttaagatagagatcggtccaaatcgagatgaggcttacttacgtcctgagacatgtcaatctatttttgtcgatttctctagattatttaaagttagcagaggaaagttaccattaggtatagcacaaataggcaagagctttagaaatgaaatatcaccaagacaaggacttttgcggttgagggaattttatcaggccgagattgagatattctgtaatcctgcgaaattaaatgatttgaataagtatgatgaaataaagaatactcttttgagattttatgatactcgtataattgaactatcagttgaagaagcattagagcaaaagatattgccaaataagttagttgcttattatctagcattacttgtagagttctttgataagactggaatagataagaaaaggactagactcagacgtttgtcagatcaagagaaggcattttactctaccgtcgcatttgatttcgaggtagatacatccataggatggttagaattagttgcatgtaactatcgttccgattatgacctaaagtctcattcggctactagtaaaactaatcttgaagtaatggatgacgatactaaagtattgcctcatgtatttgagctctcactaggagtggatcggtgtatttattcaatactagagcattcttactttatagataggcaaaatgatgatcgagtagtcttgaaactaaggccatacatttcacccattcacgcaggtatacttccattagtaaaaaaacaagagtttaaggataaagctgctaaactcttatccaatattaagagggattttgatgttttctatgatgaatctggatcaatcggtcgtcgttaccgtcgtcttgaagaaatcggaaccccttttgcctttacagtcgatcatcaaacccttgctgatgacaccgtcacggtcaggtttcgtgatactatgaaccaggagcgaattaaaatagatgaagcgcactcgtttctgtccaaacaactgtctaccttaacataatttgaaatttttgcgcgtcgcttaccaatatgcactatctgtttcatcgatgtgatttttctgtttgtttttactattcctgtcttctaaatatcctttatcctttttttccttcatatattgtatataattcataattagtgactcttccttaaagatcccctccgccgctatgactgaaggagttcttgtagttggtaactcaccacagcaactttcctcaaatttctttatgtggtatttgacgaattccattccattattgatgaatagttctactattttttgtgattggggtgaatcatcaactaatataataggttttctggctctcaaataaatcccttgtaatatcattcaggaaggacaatcagtttaatattttttcgattatattttatcataatatgtctttattttgagaattcacttgagcaatagcaaactaaaaataatttcaatttatataataaattaaaacacacttgaacacgcttttaataaacaacttttcacccttcataggagacattgtagaactattgaatgagcttgagaataattttgaatgctatgattgtaatcaaattcatgcccttgacacccatttagagcttcttgagcgatttgataatgtcatcttatcaggtcgtcaacaaaactccccacttattaacaagataaattctcgtattgtaaaggggtgtttagtattggacaaaccattgttgggaatttgttatggggggcagattctaggactgacccttggttgcacattaagaaaaattcaaaaaattaaagatacaatagaaattgatctaatagaaccaactcctatacttgagggctataaatcagttaggatgtatgagagccacaatttctgcatttcaactctgtccgatgattttaggttgttgggaacttcttctcactgcaataatgagttattctgtttgaataaaaaaccattatttggaacgcagtttcatcccgaaaagagtggcaagcccggaagggaccttttggagaactttctcaacatacattaggattaccgtgcccaatttctaaataggttaggcgctagcattatgatttttatttgctatctactacagttacgctgtgtacaaaaatgaaaaagataataatattcagatatcgcttccccttgttagtaaaaatgaagataatgtagtttttccgcttgtaataaatgtattaacaaaattctggggtgaaataacaccagatgacgaaatatcaaagagaactactctatatgcgaatcatagaggcactatttttatagaagggttagaaattattgaaaaaaaattcaatttattatccaaagtatatcgaggctctttagatgatctgaagaaacgactaggtcaagggattcctctaatcgttatcttgcctggtataaatgacactatccaatttgctactattgtgacaggttatgatcctgaggaaaaaagattaataacctatgttcctgaacctgattcatttggagccattccagaagaaaaattttttagcgaatgggcgcaggaggattttttaactatgataatatacccggaagatgccaaagatatactcaaaaacagttcttttatgtttgaaaaaactaatcgaatttctttagaagctgaaagattaaaaatccaaggtaagaccaaagaagctttagaattgcttacaaagtcacttgccagtaacgatgaagggaaagataatccacaattgctgttaatgatcgcagggattcttaatgagaaggatgatgaaaaatgtgttgaactttatgaaaagattatagaactaaatccgaaattttatttggcacataggggaatagggaattattaccttaaaaggaaaaattatttaaaatctaaacggcattatctaaatgcgatagatatcaacccatcacgctacggaccaatttacaagaaccttggtattacttacttaaaccttggtaacgacgcatctgcaaaagaatcgtttagggaatatcttcaacgtgtccccaatgctcctgataggaaaaatattctcgattttataaattcataattgttgctctgacagaagaccgttattgtgatagatcaagtttacatgacatcaatatgagcaacatagattttcgcttctctacagataataaacatgctatcgtgatggagcctacaatcaagtccatttcattcatgaaattcttgaaaaaatcagccgttgcattgttaaaatcaaataattataaactagagtcgatcaaaacggaaggattctacttgataatattcttacacgatgattcacaactagttcaagctactgagttattaaggaaaatatctggacttttatatattttcataggtgctgtcataaagcttgaatacgttactttatcaaataacgttttatcaatagcaaataaattattattgaatggtgaaaaataccttatcaagatagaaacttcaaaattgacggagtccaaagatgatgactttacatattttagacatgatcttgagttttttattcaaactgaattatctagcaaagcactagaccttgtacctgtacaagatgaatctcaggccgataaaatattgtacatactaattgggaacaaaatagcattcataagcttattagtgcttaaaggttctgattgcacgccttttaatttcttacaggatattgttttatgtcctgtttatgatgatagttctctactgtcactagtacaggttttagattcaggttatatgccgttaccaataattttctttcgtaatcgagctctactgataaaaataataagaaaatttgatgaaataattaggaactatccaattggttccattacattctatttacaccctatgaactatatacagctgccgtcggtccgacatatcaatagagcatctgaagatgataatatatctaaggaatggaggagccaagttctaagattagtatatgaacaagttatcatcaagattctgctaaattccaattttgactctatgtttattagctttccatttgttccgtttattcatcccagctggtttatagagaaaaacattaagctgttcaatgaatcaaaaaaaatactccttacaccacttctttttagttttactccacgagcatttgaaaagaaactgacaacattgatcgatacaaactataccatacatcaaaatactctaatccgaaattatttagttgacaatgaaccaaagaattttgccaaggttgtggacaaaaatgcaaactctattgaccaattgaattttaagaaattttcatttaacgtacgaaagaacgatatccttgacattctggattccatctagtttgttacttatttccatcaatttcgataccttgtcttggtaagaattatcacaaattaattcgtttagcgcatcgataagtatggtttcattcattgtctttgaattaatcgccttacctatgccaagtttctctattttgtaggaatttgccaattgctctccgtgactttgaataggaatggagataattggctttccatattgaatagcttgtgatatggctgtgtgtcctccacgcataataatgacatccgaaagaaaaaaaatttcgtccttgtatggacaccactcaaaataccacatattactagaaatttttttgggaatcaccttgccgtttgactttccttctgagaacacaaattgaaaagatggcgccttcttgaaaacttcgatgagcttcattattattggtatcctggttcccatgggtccactaatgtggacaaaaataagcggctttttactgtcaatttgtagaacttcctttgctttagaaaggctattttcagtaatttttgctctcggggttatgaatccaacgtaatctaatttagatttaattgattttacagaatttattgtgccctctgatatagtgtagggaggaggtaagtcaggtattagaattttgtctgacatattccaaaaacctcccattaactcgccattgcacgtttcaaataatctcgcagccttaaactctcgcagtctgggagttagtagaagtttgatctgattaattatcaagatttttggtaagtttaatattcttgcggctataaggggggataatctggaatcagatataataatatggggattaaatctctttatgtatcttatttccttatttacttgaataggtaaattgaccagccattgtggtatcttattgatgttactcataactgaaaattcgccatccctcccccacatgaattctactggaggaactttttcacactcaaatccttggctcaagatataattacgggcctcaccaaaggatgagaagcgcaattcgatgccgggttcttttatattttccgctaatatcaaaagcctgctggcgtgacctaaacccacgccatatggtgccaaataaaccctttgcatcataaacacgatttttgaagagactaaaaagtgttcagttgctaagtctcatcttcatgctgatagcaactgtaggcaaaaacgcaattatcaaaaaatctggtaattaaaacaataattattgatttctgaactttagatacataatattactgcagaccttgcccaattaagcatacatacatcctattctttaattttttgaccatttgatttgattttagaaatttcaggaatcatccagataaattttgtgtgaatgcagttattagattgatctgtttcacattgcaattccccatttacataaaacacatcaactagtattttctttttgacgtctttaagggttattctatttccttcataggaatcaaccgataaagacggagcaacccttgataggaattcctctttctctaaatatcctttcaaaaattcgtttacatattccttaatatttaggcgtttttgaattgctctctctttcatcttttgataattctctacaaagatctccaccgtaactacacttcttcctcctctcttaacgggcataattcacaatagcatgtgctcccgtttaataatttctactaacatgtgataaaatataattagatattattatatattataacatagattaacatgttataatatgttgataaaactaatatttttattgtatttgacccttactgtgcaaggcgaaaagatatggaaaacaaaacccattcgtaaatcaagaggcattcaaaggaacaaaaaactacgtagtcctaaaaaaagtagacaaaacgctatatttagaagtcaatcatggaggataagaagtttatttaggtatttaccacgcgtcataaatttctacggttcagcaacttttgatacctcggttctgttggcaatcttgctgtttatattgaaaaagtatttgctattattaattttagctatttgtagagtaatagatagccttttgaaagaggacattaatggaaattaaaatgacctttttttgattaggacacatacattatttagaaaactatgattgttatgtcttcactaataacctagataatagatctcgtgcgtaattagtccaaacatctttatgaaaagatgtgtgaatatatcgcaatctctacattattttagagatacaagaagaaaaatcaaacgatatgtattgcagatgaggttgaatatgttgtagaccgtttaattacttataaatgtgagctggtatagatatattaaggaaaattaattaagagaatgtgtctcaagtgacacaggttaatctttctcgaaatacaaaattttcctgctaccgataataaaattcaatccaatcacccgattgtgcactaatattagataatatattaaccaagttataaaagataaaagataaaagataaaagggaatctggattggttgcagggtttttataatattaaaaaattaaatcgatgttttataatcatttgaccgatatttaacacggctcataattgttgctggtttttattaaaaatcctaattatcttacaagattgagttaatcagacttatgtagttagccaaaaagctttgtgtccttctatcttttagataagcctgtccttcctttcttccttcctttgctatcgcatgttgtgaaaggttatccacaaaaccattacttacttttcaaatcgttcactggtcttttaatcaaacagtttgatgacatctatcaaacgatggaatcaaaataccaaacatgataaaacgtcttctgtctcgtagaaaagatagagaaagagaggaagagcagtagaagtagtagtaaggcagtttgatctagacataaaaaacaggtttgttatgattttagtttaatataactatacatcacctataccttgacctataccttgaccttgaccggatacttgtttgatttagaccagagtacagtatgtagagacatttaaaagattgatggcttgatgagacagtgtaccaattcttcaaaaactatcagatgactaaaagattgaacagaccagaggaggaagttgagcagtactttccaggcttcatggcttttagactacagagcaagaaatatcaagaccaaaggacaggatgagaagaaaaatacactactctggcaagaagaaaaaacatgaagtaaagaatctacacagtaaacgaactcggtcttaatctacaaatcaaaacataagcaggtaggtagataggtaggtaggagacatgattacaaaatatacaagaagaatcatcctgttatcccaaaagatgttattaatacatttgatcgaggattcctaagctaggagtacaaaaagactatccaaaacacaagtccctgagaggatggtctacatttaacacaaagttttgaaacgttatcttgcgttcatttaacaccttaaattattttgatttatcttgcccttagtctttttatattcgttttgactgactttttctatgaagacctatcgtatcgattccatttggtcattttaattgcttatcatctatctatttgatagattgatcagttcatctcatttcataaataattgctatttgaaaatggggcattatctaagcgtcattatgaattctttttttatctatttgctagatcgagaagagagcattttaggtaagggccgatttatgtctatttatcttgaatttaatactaagatcttggaaaattggtatcgctcatttggtctaaaaaaatatggattagagttaaagtaatagatgcttgaaataactctgtctttttcaaagcattcaattagcataatagtaaaaaatagaagtaatttatcttaactaatcgctattagtcagattcttctgcataaatcaatttcatttcatcgaaagtgagtttctctccgctcgacattttcttcatggcgacctcctttagcgaattccatagatcttgattttctctgtttttgcgcattttgtcttgaggtatttcgtgcctgatctttctttctggactataacgtctctgtctctctgaagaatgctgtaacctatttctcttaaactctatagcattaagttgggtatctaccatttctatcttagccccggcttctctaactctgtgaatgacacctcgtctttcttcataaagttcttccctcctattcaacaactcatctaaatttgactttattttaccaattccctttccaacatcagctttttggtcaaatatttcattcatttttcccttaatgtcatcaaactttgttgccagtgatttgtacgtatcctccttcttgtgaattacttttagggcatgcaacctagtagctatttcctttgattttaagaccaaccgtctttcttcatcctttgataatttctttgtttgaatgtccctctctatttgctctagtgcttttgtcaaatttgatagattatacctgtctcttctagaccttggacctcctccgctagatgctttggtatccagtgttttcattctttttctttcttcaatcaggttgctctttaattctgtaaattttgcataatctgcatcctttacttcattaatttgttttagttttagtctttcagcttctaactttactctttcttcgtcaataaccttctttgtttcttcaatactttcattgattttctcaatttgggtttcccctagtttttgttcttctattaatgattttttgaagtccaacagagtcttttgatttgaatctattgaattttccgatctattgtctttttttgtcgtagatcctgaagctgcagcagaaggagctgtagctggatttccactgttctgttcttgaaccacgccgcttacaacctgttaatatatggaaagatatattttttctgattgcattttggttaccagcttctcaaatcaacgaggatggtggaattcaaagtccactgataggatttttgaaaaataaatccattttgaagactacatggtacaaagacgatgattaactttgttattcatcgagccactaaaagtcaaatatcaccttcagatctaaatatcgtcttgatttactgcagatcatgactatatttcagacgattgtgaatatcatacaaacatatatttatattctatcttgtggattaatagatgagtaatatggatgattttgataaagattttccaggatttgattggaaaaatactcccgcttataaacatccaggaggaaaagactgtccttgtccgaagcacgagtatattagagagcaaattaatgttgccaaaactttaaatacaaatagtaaaaatgtagatactgataaaaaacctgcttcaaatgttacccttaaattttgtcctgatcattataatgtttatttcaaagaagtgattcctgccatgcctttaaaatatagaataattaccaaaattgcattgaaattgggagctgtagtaatccaacaaattccatatatgatgtctgacaagtgcttttattgcaaatttgggtcaggaggttttgataaaaaggtggaattacccccaatttagttttatttgatatcggatttctttagtagattttttgctaggttagaatgattagatactagcacgagggcggcaatatttcttacaatcactgataaatatggtaatttatcgtttggattgtttttatacccatccaaaaaagatttttctataattttatacttttcattatctaggtccaataaactagccaaaaaaataccaatgtcaacgctttttgtatactctgatgcatggttttgtatcaaacccaagtcggttcgtattatttctaaatcccttactaaataattctgagctttgttgtcaatgaagcaagagccgctattgtgtagacttctcgttattgtgccaactttgtaaacaatttctaagttgtggcccttttgtaaaaatccatagagattgccgccatcgatatattcttcaatgatgatgtccttattgatttctattaatctaggtgtgtgaatccctagatccttcaatttctgtctactggctgaaccttcatttatcagaatagatttaccagtcctaaatggggatgtagggtgcaatagtacaaatgaaataaatgtgaaaacgaaaactaaaagatactcgttaatgttctttatcgtcttatttcttttaattactaccatcttaccttcaatttttgaaattgcaatatctctctgccaattcacaaagtgcaaaataatttagtctctataataggggtggtctattttaaaaacttttaagcgaagcacgatattagccaaattgaaaattgataattgataagctaattttgtcatgtcacaaaatttgaatttgatgcatcattgtttaggaccttcgcgaatattcatatttaaaacttaatagacggtgttctataaaatattcatgtgtttacgtacactaacttttttagaattttaagcacttttgtaattgctggaactttgttgtctctcacagccacaaatgcattcgcactatctggatctcttgctgattatgaatttggttatggtcctatagcaagcataaataatgactggatattagcaggtcattggatgggttatcataatccatcaaacctcactgattcaggttttcattcaacatttgatatggtaatgaaaaatgggtcagctcctcatatgcatcagatatctaacgcaaccattagtgatgtgaaaatggatggaaataatacagtcattcagggctctgtaacaataacaatgaaagatggacctgtgttaaatgtgccgactacttggacaatttctaataataatactcttgccatagagttggatccttcaatgattaacaatcactttggtgaatccccaatttatggactcgcattaacgcctgagaaagaaatgaatataatgaacaaaatgatggaggattcaaaattcatggatcaatggattccattgatgatgcaaaatatgatgagtacattaaatataaatggtgaaaatatgacagcgatgcctcaaatgatgaatcaatcaggttcaaataaccctatggaaatgaatatggccaataacacggtgattcaatagactgattccttaacctagagtttaaacaaatacaaatactctttatttttttagcatttatattcatgagattttcttcgaggcttttaataaactaaaataggtgcatttcatgctaccccagtgaatgctacctacctatgcatagacccgatgggagactagtcatacaattgttgttagtataatgattattgttaatatttatcgggagattatttgcattgttgatatccagtacgttattgaatacattgttaaagtccacataatttgaggaactttgtgtatcgatgaaaataccattcgtcgtgttcaatatgttgtttccattgatcaaactgtttgcagtattgattaaagtgacacctgacagcctgttttgactaagttgattgtatttaatgtctgcaccatccgacgaatgcaatgctacaccaatagtattatcgtttatcatgttgttggttatttcggagttttgagcaccggtcacataaaaggcaaccttgttgttgttagtatttatgtcgtgaacgaacacatcattacttccagagagatagactccagattgaaatcccgttatgataccgttaccggatattgttacgttatgctgaccagcgaccatgattccgaccttgttgctgtctagtcctggacctttcagtgagaatccattcatatctatgttggtattgtttgctccaattatgagtccatcactcttgcaaatcaaattagaaattaactttacattaccttgtacattttgaccacaagctggatgtatttctacggcaggttgtggttgactttcggataattgatttacttcttcttgattttcttgtggaattttagttgcttcttcatttgtttgttcatcctctagggatatcttgctaatttgatcttgttgtatttggttttgactatcatcgttagtattactattagtatttcctgtattttgactagtaatgatattcctgccagggtcaggttgtgaggcctgcatattagcagagtcattgaccgtagaactgaaaatcatgttatttgctgaaaatgggaattgaaacaagatagagaacaagagaattgtaaatgacgaatttaataataaattcttacagcttggcattactactttcatcacagataaaattctacacgatgtatattatatcaatattaccattatgcaaagccctgaactactccaattaaaaattctactaattacgacagatcattgcaacggctggctttgaatctgattttattaatcttttcttccaagtaccactttatgaattcgtttttagattaacagatcaaagatatttttagactcaaacgctctagaccgatgaaacttatgcttgcctgatagtagtcttgaaaagaattctagtttggataaatttcataaaaccctttcttaagtggagttatgtttagtcttaagcccctattgattttgtttctcagattattgccttgttaatacaagaaatgataaaaaatgtcttacaatgagtagttatcttatcttggagacgaggtagtaaatttcaatcgatatttttgtcttccatcagaaaattcagtatgtcataggggggagtatttatgattatcaagtttgagatagtttttgtactaaggcagcaaaaatgttatgatagaaactttttattttgatttattgtcaattttttatgagtagaaatctgcgatctttgccacgaaaaggttatctgttatgataattttcttccagttccaaatactttcttttcaaattctcatactcagagggttgtatgtctggagcattcaagtacatgtaatttttcaaaggctgattgcttttaacatttttccagttcgataggaatttctttataaaatcatcgattacttccttattggtgatcccagttgaatcaattttaagactctcattaataaagcatatctcttctttattgtcgccgcttatgtattcgataggaattggcttaaatttttttccttcgatcttatctggaattattactgcaatgtagggttttttttcaaattctattctctttttttcacccattatacatattagagcataaaaattaaaagtcaattggaacaaaaaaaatttgaataatttatgcaaattttgccgtttaatttatatcgttttacgatacaagtgaaaattatttcaaaaattttttactgaaaaataacttccatctcaacaaatattaatgcgtcacaaaaattaatgtagatagaaggggccgatcgtctagcctggtaggatacggcattggcattgccgaggtcgtgggttcgaatcccactcggtccattacgataatggttctttattttgggttctacgaattaaaagtgtataagaaaaagtgttaaatcatcaaaacaatgtggaacttaatatctggcaactttattatactcgctaaagtcgagtcagaccagaaaaaagtaccaaggaaggatagacaaatttttccattttgtaggagtggagggtaaaactacagaagaaaaaagtattcagtttattgaaaaggcaagatcggaagaaagtaaacgggtttttaattcagtattgaattttatgttgtaccaggttaccagagttcaaaataaggaaatagtagcatctactatccaaaattatctaaaaagcatcaagctattttgtgaattggcagatattgaaatttcttggaaaagaatatcccgaggtcttcctaaaggaataagctttgcagatgatagaataccaacagatgatgaaatacaaaaaataattgaatatcctgatagaaggattaaggcaatagtctataccatgatgtcttcaggtatccgactgggttcttgggattatcgtcgttggggtaacataaaaccagtcgaaaaacgtggctccggtggtggctgcaaaggtgattgtctatgctggagaggacgaggagtattttacatttatttcaggtgaggcatacttcgaattacacaaatggataaaataccgtgagaattgtggggagattataaatgaaaacagctgggttatgagagacctgtgggatagtggctctctaaaggatggtaaaggtctggttacaaaacctaaaaaattggcttcatctggaataaagaggttaattgaaagggcaatctgggcacagggtctcagaagaaaacttgaacatgaaaagataagacatcctttctctgcagttcactcatttagaaaatggtttaaaactagatgtgaggttggaggaatgaaaccaataaacgtcgaaaaattgttatctcatagtattggtatcagtaatagctattaccgacccacagaaaatgaaatcttagatgactatctaaaggtagtaaattctttgcaggtagataataataataaattacaaaaagaatcacgagcatataaagaaaaaaagacacagagaatcaaattataatcaattcaaaaacatgattgaaaatgcatatcttcagaatgtacaaattatcaaaacgaatgcttctattatgaaaacctattatagcatgtttggaaatagcgagatagtaaaaaatattgaaaagatggaatctgattttttaactctaaatgagcaatcaaaaaaatcaatgctcagccagttggacctcattaaagataattacctctctaatgctgctaggatgaatgaacaatatcaaaagacacctaacattgataagtttattcccaatcctgatggctccttgcagcccgatagtaatttaaagaaataatattagttgaatagtatatttagtactaatattgtcgaaatttctacatccaaaattgcagaatacgactaattgactaataattactagggttatctttgggttgagattctacgatgatcaatttttttcaaaagattcgtcaagtagacgaatttgaataaattctttttttctaattgcagtttggtatgatctctaattctaaggtatggttgggataacccacaaaacttggtctttattagagatttgattacatccgattaaaagaccaaatatacggattataaatatattgcactgttaatcgaactcggataaggcattatcccagatgtacccgcaaatattaattaaaaaataatccgtgtcgtgaaaagtttatcgctgttaatatagccttatatgttctcatccgttttcacagtttaatgaataagaatgtttatgacagaaaaatggagtgtataaaggaggtaatattatggtggaagtagtagagctttccattactccgactggagggtcttctggagtctaccgggtggacatcagaggttccggattcatgccaaatcagacggtgttttggcggttacggggcgaggatccggcgtctgaagattttatcaatgctcctagtggcggtggcgtcgtcggcccagatgggacgttcttcttcactgatagcgctatcggggcgaacttgaacgaggattgggggggccaagacgaaatcttcgccgatgtatactatacctatgttggcgcttctcaccacaggtccaacacgatcaaacgcaacttctgaattccgactgcggcagctatgactggtcaaagtatgctggagcgccctaatccttgcgtttggtaaggagataatctttgacaaatacaaaggataaggaatctatctattaagatagttacaataaggagtctttcagaaatccaagtgtgattttttatcttgacattactactagatattttatgcccccttcttgtagtgttgtagatacatcaattatttgaaactcatctacattcagtatttaaacacagaagtagtcaatctaagaaccaaaaaaatactgttaataatatgaatctgtattggctgtgtttcaactaatatttctgcatcaaaacattgatattgtaaatgaaataagcgtatactcgctactagttaatctttttcatatatattattcttaaaatatttcatactgaaagtttatccatgattgattcataactcgatgatattcttacttcgataaatcggtattcaatagatttcgatcgtctgttattaggtctaaaaagaggattgggagatatagggttcatgttaaagtttatggcatgactctgtcttcgtgacaataattatagagatagttagatgtgtaaagttacagaccctaatcaggacattattatcaaactaataaagagaatgaatgatcatttgaacccaaactaggaatcacatttgactcaaaggaaaccatagtagagctaaacgactgcagctttatagttatctatagattccattaaaactgtttgtcgcatatcaaatctcctccgctagggtatgacggtatcgcatcattcatttttagtattaggtgaattaatcgactggtcatcacctataattgatcctttaaacattagaatgatcactactaaagctggaataatcaataaagataccattatattataatgtggatacatgaatctattttcgatgctccaagcaaaccaagcaacagtgatgagaattaatactggacctatcaatgacaatattatgacttggtaatgtcgttttacctcttgtgttattttacttccacgcgacagttgaaatccataaattacaagtgctagactaacaagtaatgcgatagtaccgatataagtatcagctcggacctgaattgcagtctcatcattttgttgaattatcctgttgttctgttgaatgatagtttctaaattagtaatattattcgttggcggttgctgttgtcctagcacattctcatttatagagtaatagatgatgataatcaccgttgtcacaaccaagcagagaagtatcctacagggcaggttcatttgtttgtcagtactatagtctgttcagctcaattctcataaacctttcctgatacaaactcctcagtcaaggccgttttgacaaaattgacatatactttaatccataattcagttttacatcatattctggataacggactataaaattagggctatacgctatactacaatgtgggcaaatcacaaaagacaatagctattgctatttaaaaagtactgcttaacagagaaatgctattcactgaatttcaattagtgttacctaccttatttcacaaacacaagaaatacaaacatcaattataaaaaaaatcatggaacaaatgttcaagaaactgaaaaaagagcaacgatctcaacaacaagtcaagaaaggagatccgataaattgctaatgtttttttggtaaatccacttcgccgctaatactaaagtccttggattctaaataatcaggagtaaggttttggaaaaatttgtcgatctcattggaggtattgatggagtatactttataatcatttacatttacaaaattgactaattagatcataaacttagaaactatgactagggattttatcaaatttattatcattgactgggccatatcatagtggtggccaagaataaaaagttaatcttgcattattgattgattaatacattttttgtctctaaatcctaaaattattaaataatttacaagttgaaagattgagaatttttttagaaaatttgatgtggtatgaaagtgaaggtaaatttgtctcatttatttcagatgaaaataaaagacaccaaaaagggaggaatggattgataattatgaaaggtcttgtgtaggatttttggctctcattattttgtttttggtgataaaatgggcattattttgagacctttaatattatcgttaatttattaatttaagttttttcatttatgctcatttcgtttctatatagagtactctaggacgatattaattgtttttaatgatatttttaaaaaatataataacatcatttttataacattatattaacaaataaaatcatgatagttgaaggaataatatgtttggttataggaatagtacttttttgtgttactccgttgtttcactctccgtcaataagtcgtattgttaggattatagcaataacccttatagttataggagtaatcttaattgttcttggtcttgtactaggagtagcattgatgtcattaggatctttatcctttcctacctgatctccctcctcactcctccctctttctattttgagttctccctgatatcattttagcttttttttgcagagaatccggtttttttttaattagcaacgttctgtctaaaggtgtgtctttttatttttccttcttgaaagtttaaacgattgatactaaagtttattttatatcttgattgttactgtaaagaggatatattgttagagtaaattcctataaaaaaaagggtctagcataaacgacgcggagaacaaaagatgcaaagacccttatggaattagagtaaacattactaacaggatgagtttaaaaatgaattgtatcatcagtcagcgtcgccgtagttacgatttagttttggacatcttttctaataacgggttcccgaggtagaaataattctcagcatgtactacatattaacttctcaagaccgcacttttttttaaacaatatagttattgaactctcgctattaattttgaaatcagcagatatcattgtccatacaacgtcaaaaacaaacgggtataggtaacacatatttccaagatctcaaaatcatatttaaaatattattggcatcaaatctgcaaatacaagataaagcaaaattattacacagatagacttcccttaattgtacagatcattcatattttggaacataatagattcctgaacccttcaaatcagtgaataaggaaaaaataattaaatgcttttttagaaattacaaagagatgtttcttagacgtaattccatgctttaagaattttcctaatattcatatagtttattcaaaaattattcattaaatgtttactatttgttataaaattccatatgcaatatacaaacttaattgctgagttctccgtttgggtaaaaaagtgcataaaaatctattttgtttatatgcccaatatataagatgtgacgtttttacgattgtgactagtcataaaactaaaatcaagttttgaagtagatgttaccatgaaaaaatcatataaattataacacatacgatgattattttccatatgcttatctgattaaatacttttgatatggattatctcattttaaggttaaaacccattatcctatgtcttattcttttaagaagattctccttttttattaaaaaaaggaaaagaaagtaaaaattgttgtttgagcttgatttgtgggttgcctgatagtctacttatctgttttattcgctacagatgaataagatgcagaggatctataggtattatcttttccgattccctcataaatccttacatttctttttcctatgtcggcaagatgttttgattgttcttttgcttcgttgactgcgtttttgaaaaagccaatattagaaaatgcgatgtcattaaaaattctactaaatgcaattacgttttctgtatagctacttatcaaccttgaatacatctcgggtattcttctaaagaattctaggttattccataattgatcgtggacattttcaaagtatggtgcgaatactgactgaaaggaatttatggcctgtttttggtattccagatagttttctgcgatatccttggttgcttgtgctgtttgttcctgtgtgtcagtaattgcttgggcaaaacgaggaatttgatttatggcttcatcggtgtttctctctatacttctcttagattcttctaaggcgttgctgacagatcgagtggactgctctaaattataaatgttatcaaatgattgcttattattattattgatttgataagaggattttttattgtaatctttattcttaccaggaatagtatcttcgattatattattagattctgtttcgattttatcattattagacatagtaatgccatttatttaacaagttataaaagggtgataaaaaatcaccaaacaaccttttacttcaattagtaattcctcttaaatcagattcaatagcctaaaatttcattaaataacagtaatttaatcaaagtcatcaattataacaaatatccaacaagattagattaagagtaaattttaagttcatcatgtttggcggatttttcccttgctccctcacctccgaattcagcgcttaagaataaaacaggcccgccttctccagacgacaatcgtcttaagacctgtgaaataatatatctcatattctgagtaagaaaagtattttcaaaaaagagacaggagtccgagtaaattatatctgcattttcactatcttgaagactgtaaaaaaatctatggcaaatttaatataatttcccatttctccttctaaatccttacttatattacaattctcccatactcgcttaagaaacacatcaatatctttgaccattatatgataaagattatgaccaaatcttcctaatgatgcggaataggtggctttaacattttagttttaattgaaaagagggttccaagagcttctcaaatggtattaagctgtgacaaatactgaaacgactattatcgaggattatgaggatatccacatgatttccaccgaacccttataccataagggacttaatcccacagaataattaattttatcgatggggactcaattaattaccgtcttttagactggagtaggttttattgattcatctaaaagctatttaaaatctttaaatgacaatctgtcatataaataatcccagattattacataggaaattaacttatgcgctctaaagaatcccctttcgtagtcattcccatcaaaggttaaactaatagtacatttcgcttctttgtaaccattattttttataggtatgcggaagacgtcattttgatttctaatttcatgatcaaagctacctataacagattgtccttccttggtaagcataccactagatgaagaaatgaattttccaattttggttacatcattaaaaatacggttcacgtcaaggttatgtttcaatagccaactaatacatcgatatggcttttttattatcgatggtgtttttgattatttccaaataaaaagatgatctttgtatcaaaaattatctgaatagctctgttactttatcaagacatcatcaacaatagtaatcacattgaaaaaaataatttaaagaatttgagtggaataggatctacatgaacgccatttttttgtgttccttacattaacaatagtattagttttgataatctgcccgatccactaattgatacataaaatagtgctttatttcaagatggaagtggtaaatatgaagctattaacttcaaacggcctgaaactgtaacaataataaataatccgaatgtgaatgggattcatgaaactcaacataaacagagctttgatttttcaaggggggggttcgcttggtgcatacgaagcaggttgttacaaagctgctaaagaagatcttttagaatactttaaagaaggcggcagggaaaatgagccaatatttcatatcgtatctggaacatcaataggcgcaataaatgctgccttattggtaagctatgtaaaggaaaataaaacatgggaaggatctggtgaaaggcttgttgatttttgggagtatctttctacacaatcctctgttgaaaggatacctaactttaaatcttattgggattcttggcataaattagataaacgaatagcatctggagaatcagccagaagatatttcagcactaaggaatttattttgaagggggttcctaacgtattcgtacccaaaatacctatgtttgataatagattttttgatccatcaaatacgtggtatgtctacgacaacaaacctttaaagaaaagtctcgaaaagtttgcaaaatttcctatttccacatgttacgaaaataacgaaccaaggcttttgctggttgctgtggacatactagaccttactcctgtggtttttgatagctacgaaaaggaggatggaacgaggaagtcagatacggtagatatggtaaaataaaatttggtaattctgagaaagatcagcagaatactgaggggtttgaacacattataagatataacgatggaattacatcagacttcgttctagcaagttgttcagttccgataaattatgactatacttggctaaatgtagaaagccgtgccttagttgatgatggagtgcaagacgacaatgcagatactggggatatccatgtgccttctcattcgaatggcaacaccggtttgcgcagtttctgggacggtggtctattagctaatactccattaagacagacaataatcgcttatagggattattggtatgacgtgaaaaaattaaaagagaacgtacctaaattgagatacggtataataaatctacatccggctagacaagattatctaccatctgactatgacggtgttgttgacagaaagaatgatataatatttcatgacaggacacggtttgatgaaaatgtctcaattctgttgtccgatttcattacttttgtcaagaccctaattaatttagccaaagagaacggtgcgagcgaagaagcactgcaaaagatcttggaggccgaaaccaagtccgttcttcttgccactggcaagcattggaggtttgaggatttactaactgtcagcgtagatgttgattatgttgttcgtcttgagcgaaggaatgacagtcataccgtatctaataagacttttgacttttcaaaaactacaatcgaccagctgcttaaggatggataccaagaaactaaggaacagatgatagccattattgataggctaagggaaatgaataaatgaaaggatagctagcattgttgctattctggcctaaacttttagtatcatataacatttgaactaattgtctttgatttatatcattcttccattggtcatgtgtgtgcaacttcattaatcaaaacagtaaaatgttatccaatcgattattttaccttcaagagtgcttacaaatgaaattcagatatatataagagctgatatctgatttgaatactggtgttctccttgttaaatgaaattaacttgtagtctattttattacatagatatactagtcagaatatacaatcgatgagggtctttaaccatactttagatcagacgtccagaatccggctgtaatttcactggaattaaggcagagcaaaccaccatgatccacaggtacgagtagtatgcctatgtctgttgatacctacctaattacaaaatcgctacatttcgttatggttcaattatatcatactgagaatgtctttactgctccctattgatccattttgtctttttatcaggagatttggtcaaggtcaaaggattgctccaatgcatcgataattttggaataggggagagagttttatagaacatcagaatgagtaagaatcattgctaaatgacgtgcccggacttttagtcactagggaaattgctcttggtttattcgttgtgactacaatgctttccatcggcctgagcgttaatctgaagcagatcaaaggtattttgtcaaattataagctaataacaaaaggcctactagctaactttttgataattcctttggtagcgtggataatagttcaggtaatcccaatggacaattcgataagtacgggctttctattggtatctgtatgtgcaggggctgcgttggggcccaagtttgctcaaatggcaaaatctgatattgctttggctgcaacaatgatgttcttcctttcagttttgaccgcattcatcacgcccttctggcttggtgtgttcttcggatcagctggcgatagtgctaatagggatggttttgcgactccaagtaatcatacatcacggatccttatcgaacttataattctctacttagttccaatgttatttggaatattaattaacaatcgttatccagacagggttaaaattaggactcttttggaaaaaggttcaactattctcctgatagtagtagctgccctagttctcatgaccaatctaaatgggatttatcattatgttatggggagtgtgggaattatcataagtttgataagcgtacttatctatggtacactaggatatttcctgggcgggcctcggacttcaactaagcgatcacttgcatttgatactgctatacgtaatgatgcggtagctttgcttatagcaactcaaagcttctctgatcagcctaatgttgctgttgtagttgtagtttttggtttgactcagattattgtaatgggtgtaatggcttattattggtcaaagaaaagcaagggatcagaaattaaagcgagtacaatgggatagaaatatcaatagcattaccgtctgggataggaaaaataaaaacattcaggtttgctaatttaacactctattctctccgtgaatatcagacagcccaattcgatatacaactgatgcctcaaatcttgtataattatttaagtaatagttagctagaaagttgtttttaccattttgaatgaaaaataggtatggaaatgcccatggtactctaaaatgttgggatcccaaagccctggtaagtcaggagatgattgttgttacaacagggactacttgtacctatctctggaataagagatctgtatttggctttgactttcttctcctgtgacgattgactagaactaatcaacaacaaaacagaccgttaaggtttattacttgaaactcgggtgataacctctgatgtcgaacaagatattggaaatattaaatggttttctctgtctggtagatgttattttgctaattcatgtatatggccatctaaattcagtttcaactttcgaaatcatagccattgtagtttttgatgcatttgttgttgctcttattctattcgatttctacggaagactgaaaaaatcgcaacagggatggagatatatcttggataattggtttattatccccatatcactaccgattttcattttcattttacctgagacggtattttctggagctttgacattaggtataatgttcagaggattaggaatactgtacatgcttagagtcgtcgttaaggatgatttgaatgttcttggaactagtaaaactttgcatgtagtcatgacattttatatcatgctaggtgtaatcgccctcctattttatgatgcagaacgttggagtccaaattcatccataaaaagtataggcgaatcattttggtatattatccagatgtcatctggtgctacgtttgggccaagccccgttacttttgaaggcagaatcgtaggagcagtcgccatgatcgttggaactttgctaacgggaatttatgtttccgttgttactgtctggtacatgacgcgaaaaaagaaggggaatcaaaatgagctggcctacgaaacaaaacagaacattatagacaagataaatagactggaggagctaaacagcaaagacttaaaactacttctaattttgatagaaagcctacatggaaatctgcaaaaaccacgggagggttgatgcacatatactttgacgattattacaagaggttactatattagatgtttggtacataaaggattttttaagagaatcttttttaggaaattcacgaccaaatctacatgtcatgtcaaccataatgaatagattaatttattgagctcttaaatcaattgctttgaaaggtaggattttctctttaaggattcctactattaatatggtctcctcatttaacgaaagaagtgcaaaaaaacatcaatcgaactagagcaaatttaaagcaacaacacaaagaaggtgatagcacacttattacacatatgtttggaatgataatgcgcatgaattaattatcacagttatctgaaatgggtgttataattgaaaaagtaacaattaacctcgtttttattagtgaaataaacatatagatgaatacttatccccaccttatcgattcactaaatcagcataaagtattagcaaaaaaatgaggcttaattaaattcgattcagcactccgcattccgggccgtttaaagggagctgtatattactaccccaattatcatggcctttctcttctataactacaaactttctcttgaacatatttttaatcaaaaagtctgaatttttgtaattcttttgaatacatatccaataatcaattattttgtaaatatattggaaaaagtataaaaggtttgtagtcgttattaaaatattgatttgactggcgcagatctcgattcttctttggtaaagtcttctaatcatatactagctatatatcctaataggagacaaaagttagatgctgcatttaaattcttaaaagatggactcttaaataatgaagccatattattgataactgacgagataaacaaggaggatgcaattacacgcatggaaaaggattacactggatttgatgtcttgaatcttttagaaaaaggagtaatttctgttttatccactggtcaatggcattttattaatgatccttttgatggtgacaggactcaatcaaagtggaaaaaagctgtggaaaaatcactattgaataatttcttaaaagaaaattcatcaaagcaaggaaagacttgtggactgagggcatttggtgataccaaatccttctttaacaaggatagatctttacgttatgataataagaatatatttagttttgttgataaacttgtagaatatgaatgctctatggaaaaacgttttccatttccgttgaatgttatttgtgcatatgaggaaggggacatagttcaacttgacaatctggaactaaaatcgcttttggaacatcatggggtattccataaggatagtatcaaggaacttgtttatccattacgaaattcgcatatcacattattgtatgataatcaacaagacttgaatgatgcttatatcacttacatcaatgaaggtttagcccgaggtcaactttgtgtttttgcctctgttcttctacaaaacaatgattttttaagagatatttccccaaaaatcataaattttgaggaaaatgtacaatataaaaatctcgttctggtcgatatggctaattactatatccaagcgatgatggataatttacaggaatttgacaagtttaaaaataatctgatggagaacgttaaaaaggataaaaatagaaataataaacatattcgacttattagtgactgcagtgactttcttttcaaaaacaaacactttgaagaatgcattaacttagaaatatggttgcacaaaaaaccatttgagggttcaattctttgtccttattcaaaatctttgtttgatcagtttccctactattattacctctttagagtttttcatagcaatgatattgttattgactcgcatggtaatttcctccttgactatgttaaaaattctgaacatcaatccaaatttatttcttatatgatgaaaagaatggatgtctctaatttggagttaaaagaccaatgagaaatccaacacaggatccaaaaaactaccagcctggagaaagaaaagtcgatcatgatgtaaaaatgaccaacccatcaaccgtatcaacggcaattagaaaggaaattaatatccttgtttatgaaacggatcctgatattcagttcctttgtcaaaaatatttgagtatcatatcacctcatgtatcatataccatagtagacgatattgagaaattgaccaattgtaacgatatttctatgttcgataaatttaattccactcaaaaatctattttcgatactatatttattgatgtcaatgttggtgattataatgtaattgaaatagtcaaaaaattacttcagaatatacccagacaaaaaatagtctttacaacaacggcaggcctttatattattaaaaatgaactgattcgtcaaggcttatcatctagtatgactatattacgaaaaccatttagtttttcagatctgcttgcagttatatctccgacaaaaggaaaatttgataaactaaaattgactgatcatgttctggcatcttataattcattgcaggaagaattaatggatgcagtagatttcatcaaaaaaggcgttgatttagacgaattaaatctacttttgataagaaatgatatcgacctcaaaaatactgttatggctttaaaatcaaaaggattatctaatgcggatattttgctagaaaatgaatctcttgtcatcataaagaatgaagagtggtatatcccggatggtaaggtggacgtgcccagaataatgaatcaatggcaggctttagtaaaccgatcaacacaactaaagaagaaaggcttaagggcattttgtatgatggattgtttttttgaaaatggattttcaactgagcttgtaaattacgagtgcaatttgccttcacaatttcagatacctgttattccagtatgcgcgtaccgacagatcgatttagactgtttagcggagaaagaccaaaagaaattgatcgaatgccataatcatatgatcatttgtgagtaacagttgtagtaggagataaaatcatttaatttatactttatttgataactagatctgctgataaaaagatttgaatatagtatcattaatacttagatatcgttttcctgatctcaaatgacctgttttttttacttgacaaaataaataatagaatctcgattaaagggagctttgcaccatacaagaaaatttgggaattttgttattttatttcatcttaactataagatgttatttgacctttgagttaaaagttacccaaggataaacaactgctgaaaatactaatccgaatcgtaattgaggtaatttcgaatatttgttatccttaattcgaaaatcttatggggaatgcgaccatctacataaagtgtttctataaattggtagagtaatcatgaaatttaatagttgttcttcatacttgatcaaaatcaaattcaatgagctaagaaagaattaatggaaaaatagtttttaggaggaagataaaatttctccttagatttcatggtcagattattttaccgttatgcttccagtcatccacggatgcaatatgcagatatagttgtatgtaccgggtttctcaaataacattgtaaatgtatttcctgaccctggaaattgctgttccatgccgttgggaaggaaccaaccagaattgatatatttttcggtcccgtccatggtatagttagcattagggttcatgaacttaacattatcagaagaatcaatcacaactggattgaatgttcttgcgtttaatgctataatggtgtttgtaccgtttggaccgggtaaaactattggttcgttgttagaattggggggtgaacttgaaaatgttgtagtgtttgaaacaaacaaaggagaaaccgctcctgccatggtgctgttatccattacaaatgtcaccgtgtgtggttcgcctacttcggtgggattataccaatttacagcttgccccaccttcacttcaaccttgtcaggtgcataggtggtcaaaggagcaaaatgattaccgccgccagccgcaatctctatagttccgttgtcttgttgttgtgtttgttgctgtgacagggatgtcgcaagcgcagagctactgctatcccctcctgtagtttcaaataatagaaatatggatgtcacgagcaccattaaagttattgttgcaaatcccatcgtcaaaatggataaacacgatttcttagtcatattttcaagactgttttgccactttattagtttttagatgattatctaattctacagctaaaggactgtaaacccaatatcgtaaagtcagcaaaataccatattcaattgatcagcttctctaatggcttgtttactattgatacaaaactgaagatgttttagtgttgtttctgttatgttatttaatattttgtcaaacaacaaggaactgttgacatgcccaataattttaaatgataaaccaagaaaaaaaaaattaacatttgactaacgaaagtaggggtgatctctaatatacattcaaatcaattttcaatgtgttcagtcagaaaaaatataaaatttaaaaaaaagagattgtacctgttgtcctttacagtttttgaaacccattacattactgggtggatatatgatatcattatagcgtggattaaaatcccattggttggattatctcaattacattagtgataccgacataacaaaaatagtttatatcccgttacttgatatcattattgcttttgtgccgagcccaatttaattgcggttcgtttcatcattatgcacattactatagttgaagctgaaagcagtgctcctattaggaatattatattaaaggccatttcattaggtatcggttctgttgtacctgatactgaggtgggaactacgaagagagttaagaacacacctgaaataacaggacctatagctccacctataattctcatagttgcgtttgttgctgaaaccattccagtagcctcttttggtgtatggcgtagcatgagatttggtacaagggtaataaagactccgcctaaagcaaaccctaaaagaaccattgctgtttgtacaggtgttgtatgaaataggaatagaacaaccattccaatcgtaagtattacgcctcctggtacgatgaatcttaaactgccacgtttgattgccatgaaacccactatgggaccaaggactacgaataataacgcttggggtaattgtagcaatccaacatatagcacactcattcctaatccatatggctccggtgtctgacccaggacaggaattgtagtaaaaacaaggtactgaacaactcctagcatcaggaaaatcatattggctatcaagacgatcctaccaaatgctagctttagattgacaagcggttttttacttctcttctcaatcatcaggaaggctgcgagcgaaactactgcaattatcaggaatacccagaacaatgtagctccttctgcacccatacctaagaaggtaaaagtcaacataaatgctgaaatggttagtataagtgtgatcagtccaggtatatccaccaaatctgtaaacttttgcttctctacttcgccatctgcaccttccttttcttttttgatagatgtaggggttccaactttaggaactagtttccacaataagaataacaaaactaatgaaaatggaatagccgaaataaatacagcctgccatccaccatagtaaacaacggctgcacctaatactaatcctgctgcgctgcccccttggtacatggataatattataccttgggccataggtagtttcttttctccaacaatttctcttgcaattcttatagaaactggaactagtgccacagctaccccttgtagaattcgaaggccgataagggtataaatgtcatgagctaatggagccagcattactcccaccgtataacaaataaatacaatcagtagcattttctttgcaccataaaggtctgctaggcggccaattattattgtcacagaagctcccgacacaaggtaggcagtaagtacccaggtgatgacgccatagtctacaccaaattctgtcaccatttcgggtaaagcaggagttaaagatgtatgaacatataatactaaaactatactgagacccagtatccaaatgatcaaatttgcatgtttatattctgttttatgactatctgcgtcgctggtgtcacctgctttacccatgaatgtagttttttgaaatgtcaaatatatatattttaatttaagatgttactgctacaatttgatgaaatctaatactataagatattctatgtcatttttattctcgtcggaattagcgtgccttcaaaatatgaaggttatgaccagtatttacaatctttttatacgtttaatgtaaaaaatcgcttgaaagattatcttattcttgaatcagaaatatactttacttgccaattatcatttggatataaaactattctcctcatagaggttttttaaggaagaaaaaggaatcaatatccttggtaaatggtgcagtgttaaaaatcgattgagagaggggtttatctatctgggctggatttttggagtttataatacctatagaactatgcttcaaatgtcataggaaaaatgctattttccgctttgtttcttttcacgttccttaatctgttaattcccattgctctatatttccatgaacaggttagtcttaatttgtcatgaaaccctatctgtatttgaatccacatccagctttgatttttttaaatatctactcaataatattggatttacaagtagattaacgaggatcaaggaaaacaccaaagtaacaaaaagagctttatattcataatcagtggggagagaaagtactaaagccacacatattccgcctctcaatccaccatatatgagaactttttgccatttagcaggtattctaacgtgtgctatacgtaaaaatgcgtctcctccatataccaggactacccttgccagcattactataccaattggagctagaacaatgataatccaagaccaggcatctgttaggtgtaaataataaattgccatggatactcccattagataaaataaaagtgcattcagcgtaaaagccagataatcccaatacaagtgaaaagattgcatcatttctgaaaggagatctttatgtgttcttatcaatactaaggcaagaaatactatagttaccacacctgagacgtgcaaaaagtgatcggctattacgtatccacctatgaccattgctattgacaatgtaaaacttacaaattcggttcctttccatttattcagcactttaccaccagcgtatcctatagcgcttccaaggataatagaaccaaccatagaccaaacgaaagaaatggatgtatttacaaatgaaaaagctagacttgaaaatacgatcccagatatgacactaaaagaaatcaaggaggtggcatcattcaaaagtgattcccactctataagtacattaagtctgtaagggatgggaaacctcttaaagattgtagacacagctacaggatcggtagatgctactatagctccaaagagcaatgcatggataagcggaataccaaaaatgacacttatacctattcctatgaggaacaatgtaatgatcaccccagcgacagagtaaaatccaattgggattatttctttcctaagatcgtgtaatttcaaagatctagcagattcaaaaaccaaaagtgggatgaaaatcaataatatgatttcaggtaggctgtgttcaacaaaaccataaatctcttgggtctcaacgagatcttgtggtgctgcaattatgatcaccccagctatcatcatgatagttacccatggaataataaaattccgtgtataatagtaaacgacgctggctattagcaaatatccagatactatgagaagataattaatgaaaacatcatccattacaatctaatataatatcaaagtgttaatatgtatttgataaatttgtttagagcccattgaataagttgttatctatttccacatgaatctaaattggtactctttggctacaaaatacaatttgtaagaattaactcaagtgaggctggccaatggaatctagttgtatcatatcaaggtatccagactttgcttttgggtgcacaaacaagttacccatattaagaacttgtttgtaagaatggtccatgcaatgaagtttcaatgaagatctcaaaggcatccaaatccatcaaataaggattctaaatctttattctagagtagcagaactttaggtggttttaagattatgattttctctaagatagtctggggaataaatcagacacacccctttctgtagccttagtagagtatttcaggaatgtagcatatctaatccaccatcttgaccttctttttcttgtttattgatgtcctttttaatccctaatttgaacagatgatttgaatcttaatctgtttgaatgcattttatgttaaaataagaaaatatcgcggaatccaaaactaattggaaataaattgagacgatcactagcagaatgtaaatttcgtaaagttaagaatgatattgttatccaattttataatatattgtacaattatgttcttctggtatgagaattttagagcaacaaagtgctttgtgtaaatgaacaaggaccaattctttaattgtaaagagtatgagtttgtagaatatgttgtttgctctattatcgttcagctgatctaggcttttggcttttggtataagtattcataagacgataccaatacgggattcctatctctgcctttaatctttgtttaaattgggacattttaacaagaattacaaaaaatacctctcgtaagtcatgagggcggtgactttattacatcgtgtttgactttgatgatcatcaagatatatgatgccgttattggaatcatgagtaaatatgctacaataagtactggattgtcccagcctccagaaagcacagtgtttacaatatatcttataataataaaagtaactggaacaataagtgaaaaaaatgcaagtatgtagagtcgcttagtaaaaagcgaaagtttatgctcttgaccgatgtataaaccaaatattacaaaggccagtccagtcataaacacaattatagttagataaagtgcaatttgacttccctgccttgtttgttctaagagctcgatgattctatcgagcttctctccggtcagattacctgttttagatattgcatcttgattatcagatgattgagcaaaaatctcgccaattaaaaaaaaagatggaactagtactaataatattagtggaaagcaatagatagataaaatcaaaaacctctgcgccacaaaaacattagtaactagtctttattaagtaggatcacatttttgaaatataattattgggcagtcagttcatcatcaagtcataacggaatccccattatttggatttaaaaatacttacactttatatgaatataaacaaaaaaatttactgaatcttagaagaatcatggataaagcaagatctccctattgtatatgtatcacacttactaaattatgttgaattaaattgtcttactttacaaaaataatggattattttgagctttcaggcactactgcctcaaccagaccgatcttcattgcaggtgtaagcgcatcaaatactgtccatgcttctttgatttttccagatccagactcaaaatgaaaaatctccattccataagtgtcaaacttctcatggctaggtggaatacccataaattctccttcctgtgtcgctgttacgatccaccttataacaaccttgttatcatctgcgaatgaatcttggattttgaattttatatctggccatgtctgtctagtttccttaatagattctttgaaatcggtcagtccagtaaccaattcaccaccatgccatacaatatcttcactaaataaatcatcaatttcattcaattctcctttattgcacacattttctataaatctcgttacggtattcaaattttcagtttcagacatattgttgttttaatatatgttgcatttaaggtttctgatcagcagtaatcatagtaaccatcttaaaaaaatggaaaatagatatcctaaaaatgcttgcagttttcaactggatattaaaattattcaatccttcttttcattgcttagacgcctcttattcaataatctagtaaagtgattttgttagcgtcaaatatactagtcatggcattgccatgactagtatatttttaatctcttttgtagctccacaaacatcacccatctaacatcgtctaattagctttggaaattctcagttttagccgttcaaattccctaattgcgtcgtcgtaaccccgttgaagcaataggtttattgtcttttttgaaaaatcaaatatcttatttgaaatagtgtgttcatcattctcgcggtttaccctaattagttcatctatttgaaaccttccggcaagcagatctgaatacctttgaattcttggaaaaaaactaggattggctgtattttcgtctaaaagttgatcaataatttctttcttaactccgttttctgttgatactttgattaacttccttactaaattcacgtaatctgagactattaataacatactttcttctaaagagtgacgatccgagaatgtaatgtcattgtttctgttgatggctccgtctctatccactggaatttcatcttgtcttgttggatggagattaacaatgcaaatccctaatcttggtacattttctttcaggcctttggtcttgtaccaaaaccatctgtgttgtaagactaattgcattaatggtgtattggtcataagacctccgtcccaaaaatagcgtatttcctttcttggtacattttcagtcgttgaagaagttgtatccgtataattgttttcaactagaattttacaataatcaaagtttaccggaaaggaaccacttgctatgacgtgatccgcagtgattccctcatcatatcttatagtatacttaaaaagaggatgttttttgtctttcttttgaaattgtccatactcggattttcgtgaaccgtcctctgttgcatgactatcaaaggtcacgggaatcccttcagcaacatctacagcaacaagcaatagcctaggttgatctgcttcttcagtcgtagctatgggaaatttcacaaatcgctccagactcttttttaatggttcattactatatctataccaaatgttatctggatcatggaatttctgatcataggtagggttatgaggaaaaaatgcgttagttactccataaaaggcaaattccttagctgagtaatatctccgggcagcctcgggagttgcatttcttttattgaacttatgcaaaaaatcccagtacatttcaaagaagggattgttatctacctttgattctttagaaagataatgccaaaagtcaatgagtcgttcggcagaaccttcgtatgtctgattttctataacataacttactaatactgcagaattaatggcaccaattgatgtcccagcaacaatgtcaaaagtcgattttgtctctttgaaatgatctttatcccatttgactaggaattcatatattcccttgtacgccccagcttcataggcacccaatgaacctcctccttgcaggaccaaagctctctcctttgttggaatagtataattcttattattactcatataacctaatttgaatatggtatcctttggaataaacttttaaagattctagttcttttcaaattctgtgtgccagtcgataccattgtactgcccaatataatttatttatcattatgacagatgtggcaatgaaaaaaattgtacaaagcttacaattacataaaaggatattaataacagaaaaaagtgagtagacagtttaaacaaatcatagataataacaattctatctatactaatatccacacaatttgagtaatggtataacttgtctagtttctaattaagtaatagttgtcagataatataatcatggaacaagcaacactgattttaaaaaaacatttaggtttaatgtatctagcggattggtaaatgccaaattactctagaattaagattgaaatggtcatttgacttaagaaaaaatattttgaaaaactctgttcagatcttgggtagtgaaaaagatacccgactttactagccgtttaagaaaatggtgcgattattcaaaattaaatgtggtaaagttgacatcataagccatgtctcttatcctatttggcaaattttccatcttcagttcatttatttttccctttgcaattatcaggtaattgtactgacggtcctttgagggttgccaatacaaaagctgattatctttttcccattttatctcgttactagcagtggcccagaccgtgaactcgggggaataatgagtatcaaatggtacaaaaatgacagttggtttgtcggaaacaattttccccgctagaacaatggccgcatattttgaatcaacgtcaaaaaataaagcgtatggctttgctgaactcctcattgggtatggacgtgtcactacgtccatattacgtggtcttctttctggtccaagcagcgagtaattttctaagttccaattatctttcaactcttcggtattatacagatcataattccaaatggttgaatttagcaggagcgcatctatttgatcatattgtaggttcagatactctctgacttgttctccttcttgaaacgctccaaattctgttagaaaaggaacaaatcttctttcgatagcagcactgtgtagctgtctaaacatttcaggaaattgtttcttatacgtgtatatactttcaggaatctttacaaaagagctagcaacagccatcggatcataaaaatgaaacgacaagacaccgttagaatcgaaattagaaatcgatgatggatctttgggaagatatgtaaccaatttcatttctactgttttcttatcggccattactttttttataaaattcatgttaaatgattgtttaatctcaagtggtgctgccccataggccataggcgatccttctgcagggaaagtccagtctacccgaggttcaataaatataaagagattctggtcaacttttccgatgttagaatttacatctcgataaaagtccataagatacttttgttcaaattcttcttttggtatcagccctggatgaggctcattaaaaggttcgactcccaatatagcggggtgagtatttccgttatttagccactgtagatgttttacagttagttcaattatcttttccaggtgcgtacgtactggataatgtattaaaccttcatctgcatttgtcaagtcattttcccaaaaggatttgaaagtatgtttcagagatttgtttgtcatgtatttaatttgccatttcttgtcaggacgtggtggagactgagtcggggtcggttttggatgttcttcatctacagctatagtccagtcaggaaacccatctcctccatatatctcgtttgcaatgtcttggtgaaaatccagtataacgtagatatttcttttatagagctcttttattattctatttaaaaatgacagatattctttaccttcttcggagaggtcatttaggtctggatttggcttggattctaacgctttccacgatacaagaagacgtgcaacattaaaaccactagtcttgagaaggtccagtccaggcttgaccgattgaatttcattatctaaatccagctttgataattcctttacttcaagaggcgagatgggaaggtatggtggcagtttactccgacctccaaaatttactcctcgaaatatggtgtaccttccatgctcatctctaaaccatgagccatctttccaaaatgttttgatgttctttggcaaaggcatgacattatcattctcagttgcctcttttgtaagtaaattattggaatcaatcggggaggtagatatctgtttccttgctctaattccagccaaaataacttgtataccgcttacagccagtgctattgaggtcattatgagaagaagtgctagtccaaatttttcagaaacgagtaccaaaatagataatgaagttattaatattcccaaaagcatagtttcataatcatatggctctccttttttcttctttagactttttattatccttatgactccattggcaagtaaaccaaaccctagaaatattattagccatttagttgcgaaatctggaaagaagaaacctgagccaatgtagataatcaatcctagaccaacacctatattgattaacctggaggtttttttgacacctttggctgtcaatccacttatgagcctttctgccccaagtaaaattaggcctattccggccaagaatagccaaatatatgcgcctgctacggtggtggttccgtaaaacaccactactcctgaaaggatcaagcagatggtccctacaattatctggaaaatccaaaaaaatgaatgtcttaagtggtgtgttggccgattcatttagaaggggagtacaatgtatcataaatagttttagacctatcatggatctgatcaaagtcggtacaataaatgacaggtatctattttttgtatattatcaaaagaaacataatgagctcaatatagagtttggttagtatcatgcttgagcctttgtcttatagtagcagagtcaagaatgtatcccagtgatgcgaaaggtcgcatttaaaacaggcagatgtttaatgttacggattaaagaatatgatgataaagaaaatttttctagcccattaatgaaaaatctcctaaccgtagagggctaatatttaagtccgttgaattgtaatcgtccaaagctgaaattccagtcctttagtttagtcactttcaaatctcagcatgaattgtcttacagttgataatagctagagggatatcgtttttctcctctttatctgcttttattttatcccaattattagatcggtattttgcattttgataatttcaaacatgttatgcatcttaagcattgaaaaaatccatttcctccaaataacattatattgattattaattttgattattctaccaaagttcctaaaatatgtcccttcttaatattcagaagatattgaaaatgcctattctaaagaggatgctctaatatgcaaggcagaataatcagaatatcctacctaggcccacaaataattttgactgattgaaaaatgctaaatggtaaaattaccccaagaaacaagggatagtatcaaacactatactcaatatacttttggccaacagagagacaagttgatctttcataggcatattactatacttctctactgaaagtttttgacaaatccagggtttacaatttttgatgtttcctaaagtttgttatttataaaactttatatttcaattaagtattactataaaatagtattatgaagtatttcaatccatatgcattaaatgcatatcatatccaacaatgctgtatttccatgttaaacattccacagtctagttctaaccttgactctgtaagggggatttcaatttgagtattgatagatcacccggttggatacgtatggcccagatcggtttgggcgcagttatcttagtcctgtctatactggtattgataaatccagttatggggagtgtttcggtaatctttatcctcgcacttctattgttctttgccggaatcgagaaagtcgtctctggtattattggaaggggaagagctcgcttagccagtattgggttaggaattatagtaatcgtcatttccctgttagcaatgacatatccacaaggagcaactgctatcatagtaatactgcttggtatcgctttgctagttgatggtatatcaagaataattcactccttccagaacaaaaaagaaacaggcaagtcaaatatatttggcattggggtgggtgttttagaaataatatttgcaattgcagtaattgtttaccccaatattgggattgcactggcaggaattttgataggcatagctctactcattacaagcatacaaataatcgcagcaggacttaccggtcactccagaaggaaagatacattgacaaagtagcgcctatatttttatcagaaattcattttttttcaaatttaatacttaatttaagaactagctattgatgaaatacaatatcattttttcaaaaatgcattaaaggctttttattaaaatatagtcaaaattaatcttacttgttttcttattcgcacttaagatatttcatttccattgatgtgtaagagctagcaagggaaattagtttttatggtgatccggggtgatactgatggatttggatgtgaaaatgaataggtttaatcctaacaatatttgcagtgagatcatttgacaaattgctaaatttgatcacactgtttcctgattcctagaatgacgtgtttttttagaaaatcaagcacatttattgtcgactggtgatgggttggctatctgactgaacgtttaagatttctagatggtattagcatggataagccggtgtgcatttcatccccaaatttgagaacatatataccgattgctaatttaaaatcaaagtagatgttatgattttacaagaataagagtatcagactgaatatggtaagatctcagtagagagagacgttaattgtacttgtattgaaaaaacctatgtttattagttaacgagatagactttatttttacaagtaaaagtttttcaattatacaactggtattatatgggatttccaaggctaaaatcctaagatcggtaatatctttttatggccgcttttgtaagaacgagtgttgagtgagagcagcgtagcagagtttgtagtgcatcttatggaatatcttattattgctctggaagggattattgcaatatttattatagtggttgttttccgaactttatatgatattatcagaaaatatttggtaggattagtaaagaaggatccagagcagcaaatacataactatcaaatagtaagacgcatgttaagggggctactttattcactagattttttaatagctgtagatattttaaaaactctaataattccctcacctgaccaacttttgtcctttatagttgtagtagtgattagaatactcctcagttgggcaatggcaaaagaattagaaaaaagtatctagtaaaacacattttgatttgtatagcagcttactttatttcttttataatggaatgacatatacgcagattataaataacttcaaaattgcatatttgttgatctatcttgcggtaataacttttcattaatattttaagttgaattattttcgattgagaatcaaatataaaaaaaataaaaactgtcaatgaatattttattttaaaattgagaacctatttgagaacaaccaaatttactgaaaaattcctgtataattttataattttattcagagtatctaacacagaataactgcaatataaatagatattatataaaaaaaactgattttttgctacagactgcaaagatcaatcttgactttagtaggctatgttcgtatgagaatccaaatccactataactgtgatagcaattgcatcttcatttttgcaaactcttcgtcagtcaacaaacccttttgatgaagatctccaagtttttgaatcttttcggtcacgtccacttgggaactggatgattgtacattttgagactgttgtgcttgttgtgctctcaatctctcgatttcttgttgttgtgcttgtgcttgttgttgtgctagctgttgctgctgctgcattgccatatctgcttgttgttgttgttgttgcaatgcggcgttacttctactattagctgcagctcttccgactgcaaatgctgcccatcttcctctcatatctatagtattacatctgtaactaaaatagttatctggatattcagattccattaaaatttggataatgttttaaaaaatctgaagatgtctataaggactttttgagtgaaataatccttgattaacatatgaaattatctgcttatagaaaatttctcgtttcttgaacatatcgtgaagtgacaagagtattagtgaacgatgagatggtataagtcttccagatggaaacgaaataaaaaggagaattatgggctgttgggatttatcactggtattagatgaatcccatatctctatatactaacaaatttttaccagcttgattctgatttatttattatttcagtgttttacttcatgtctcctatcgtgtacccaaattgaaataccaattatcatcgctagtatcccattaatcaaaagtactatacctgctatgatagcaaagaataatattcctgcatcaatcatcaatttttgtttaacttcttgtttagaaacatcttcggtatcattagatgtactcagaaaaacattaactctgtcagtaattttttcagataatctatcaggaattttggctgaagcattaattctatcagtaactttgtcagctaatttatcagtaactttgccagctatatctttggctgatatatcgggaaagttctcgatcattaaaatagctttgtaagccgataatccaaaaataattatgctcgttacaagaataattacacctaccaacaatactgtattgccgcgttgcatttacaatagttagtaaaagatgttaataaacaatcaatacaaaatctgaaatttttaatgttgaatgtttaggttgcggttttacatagtgaccagactggtgatctctaaaaatataataggtcaaattagatggtcaatcattaaaataccaaataatgggtttgatttcattgcaacttgcactatccttccagtcatgcaggttctgaggttttctagaatgtagtgtaacactcaagccctaaatccggattgatatcgatgctggaatatatccagcatcgtctatatctgaacttttaaaatttacctggttaaattttgcctcagttcattgaacttttgtaccagcatcggtaggtcaccagcatatttttccttcagtccttctgttgtatttgcaacgccagcttgttcaagggcttggttgtatgcatctgatactgctgcaacaactttggctgcaattatcttttgcaagtgttcggagatatccaagttcttagctacggttaaagatgttgcattaataccattttgtccaagtacctctttaaattttgatataatttgatccattttgtcagcaggatcttgaactgcagttgagtttacaccttgggctaatactttattaacatataatccgttactattcaatagaaccattgaaactgcaaaaacaagtataccaagagcaattccgattccttcttttttataaatgattttcataatttgacttatagaaacaagtataaaggtttaattccttttccaacaaaataattaatcaatattattattttgaatgcttaaggactcgacatatcagttacaatgagttacaatgagtatcgagagtgaatccagaaatgtataatctatcaagatttattactttcaatggtaaatcgtctatctttatcaagcgaaactgatacacaaaaactcaaatattcttctatctttatatattagatctatttaataaagcgtaatgttatctctaaaaatatctatcgtttttacatcattgattgtgttattaggctcggtatttgtctctaatgcgtacagtcaggtcactgactcaagtggcataattgttgggcgcgagggaagtgtctttggactagttgatattgattctgatggtcacaagttaaacattgctggggttgtaaattatattccaccaacagacaaagtatttgaggtttggctatatgatggaaactatcgtgcatctggatatccattaagtgtagggatggttaaggctgacggatcttttagcatggaatcaacccaggtttctgcatacacctacaccgatatgttcgtgaccttggaacctaaagatgataaggatccaaaaccagcatattccaaccaggtaggtatttacgtcttgcctgcaccatttggacaataatccctttctaattttttatttttttgattagacaatttctttcgatttattatgttaagtgtactcttttagaattctagtaatcacagcttgccttagggcaaatggttaataataagaaatctttttgactggaaatactgccaaaaacaaaactgtaaaaatattctcacatatcttatgataaaaaaggagtaactttttattcatattttttcgacgtcgaaaaaatttagtcatttttaggacattttatatttcattttttgattaaatctttttctctctcttattatgatatctatctcattatttatcacatttttatgatgcattaacgtctcatagatgatccagttatcgtcgacttcctctataattgttccaattctactttgagttatcttaagagttgtaagaattttatcaaaggatcggtttatttttaaatctctattttcttttgaatctcctaatgtatgatattctaggctttcagtagaatcagagatagataatgcatttgcaagtttcctaacctcttttactgtcaagtctttgtttactatttccattgccatttcgtgtctcgttgcctgatttttgacataaattaattcttctgccacactcgagcttatttcagattttgagatatcttccactatttccgttggtaaatctaacagcgatagccttttcgacacataagatgggctttttgagatcttttgggctagtgcagatatgcctccccatccaaaatcagtggtataaactttgaaagctcttgcttcctctataggattgagattctttctttgaatattttcaaccaatgatatttcaaaactgtctttatcatttacctctatcacatgacagggtatttttttccatcttaattttttgcaagctaggtatcgacggattccagaaatgatttcaaaatggctttctctgattcttatgacaattggatgcaacagaccatattgtaggatcgatagggctaattcatctacagtctcggtacccctttcatgaattgtataattcggtaattttaactcacttatctcgacttcctctactattcctttcattaatgggctagcagagaaatttttcatcatattctattcaatcatctgaagtatttaatctttaataaaattttcacaattaaatgcggtatattataaaatttccatataatttcaaattagattacagatgtggatggtatttctgtagccatattctgactgtaacttataattaatgactgtattatgatttatagggttaaatcatccggtaatttaccaataaaaaacagtagaatttctgtaggtaattaagaatgaaaaaaagaagaacatgtaattggtcaaaggtgaactacccctttcattcttagctgatttatttttcggactcggattaattaagaaaacaactattactagtaataagaatatagtatcgatacctcatactggtggcttactactaagctagtaactttaatattttccggttctataccaaatttttttctgaactctattattgtatctactaaatatgagtaatatttgagatatatgagaggtttatcaaaatactacatagacatgataaggacacgcttttcaataatccctttatctaattctgataataacgatcctatgttaagtacttcgttccaaatatgggtatagtacttatcttacattggataagtaatgtcaacataattaaagaatatgatttacagtcctatgaaccaaatgatatgtgtgaatacggacaatgacctttatatttggtatctcgtaaatctagcaacccagatgatacaatatctagtaggctttctggagatttctatgtcatggggagttctgaattatctaatcttatcatatctttatggataacgtgaatttgcaaatgatgtcgaaagtataattaagagtaatatttgcagaaaactgttataccatcaggataacccaaatcatacttatgggtaccccaaaccgcatagcagaagataaagacgatggtgattctttgagtttagggtaggtccttctgtgacccactctcggaaatcataacttaatttatcatcgattaacaaatttgaaaagaattgcctgtggggattccaaatacctcatctagaaacctggtgttatcgattgttactaaatttgtacaatatccatgtagtttatggaaaagaattggtgattaggcagaatcattgattttaattaattaatgcatttttatatgctaactgtgctaatgttaatcttacaaagtgtactttattgaatcatatttccatgcaattaatagtctaaggataacctcattttttaggtattcgtgttaccaccttgctactcgtttgctaacttagataagatcttgttgacccctgtactcttgcctaatttttcttgagccaaatgtttgttatgttttgcctgaacgtttttaggatctatttttaatgtcttgtcataccactctatagcttcgccgtatctacctaggttaaatagagatgcacctttattgaatgtggcattaacatgttctggatgtatttttagagccttgtcataccactctatagcctcactatatttacctaattcgtcaagtgctgagcccttattgtttaaagcgtttacgtgtttaggatctattttaagcgccttgtcataccactctatagcctcactatatttacctaattcgtcaagtgctactcctttgttgtttagaacgttagcattttgcggttttagctttagcgcctggtcaaagtattctatagccttactgtatcttcctagagtatagtacacccaacctttgttgtttaaagcgtttacgtgtttaggatctattttaagcgccttgtcataccagtctatagcctcgttatatcttccaagactatgtagagccctgcccttattgtttagagaatcagcatcatttggtgctagctttagcgccttgtcataccactctatagcctcactgtaccttccgaggctgtagaatgctgcgcctttgttatttagagatattgtatatgttgattttatctccaaagccttgtcataccactctatagcctcgatgtatcttcctaattcatcaaaagctgcacctttgttgtttaaagcgtttacgtgtttaggatctattttaagcgccttgtcataccagtctatagcctcgttatatcttccaagactatgtagagccctgcccttgttgtttaaagcgtttacgtttttaggatctaccgccaaagccttgtcataccactctatagcctcgatgaacctccctaatttatcaaatgctgatcccttgttgtttaaagcgtttacgtttttaggatctaccgccaaagccttgtcataccagtctatagcctcgtaatatcttccgagactgtatcgcgccttgccctggttgtttaaagaaatcgcatcttcgggctctattttaagcgcctcattaaaccactctatagcctcgtcatatcttcctagagtatagtaaacccaacctttgttgtttaaagcatttgcgtgattaggatatatttttagagtcctgtcaaagtattctatagcctcactgtatctttcatgcttataaagcccagtacctttattgtttaaggcgtttacgtaattgggatttatctgcagagcccggtcaaagtattctatagcatcaccatatctttcaagcttatacaagatttcacctttattgtttagagcgtttacatgggtaggatgtattttaagcgccttgtcataccagtctatagcctcactgtatctacctaccttatttaatgtaaatgctttattgagaatcgcctcaaaataaagtgcatccagttgtagaatcttgtcatagcattcaagggcgtaatcatacctgcccaaatagaaaaattggttacccatcaatattagattctttagctccaagtcgtgtttagaaaattgtaattctcctatctttatatcgattattctggttttgcattctgtctcaattttttctacttcagtcaatactttttgacatagtttggctagtgcaatagaagagtcctgtaattcttgagccttgctttcatgcttttgaaagttatccgctaatagttggtacaataggttagatttatgagataatctttgaaataaatctgaaatctggactgacgcatctgctttatcatcaaaaataattgtgttatcattcaccgtataatttagtaattgatcatcgaaaattgctgtcccagaagtagaagtatcatttgtatccctattagattcagcggaggagatattaccagtttcatttgtattgttctgatcattaggtggtctcagatcgattccacagccgggacaaatagtctcagcatccgattcaagagaataaccacattgatgacaggatgacattaatatccttatgttctctatgtataaaagataattgcaaaagtttactattaaaaattcagaattagagcgctgagaacgataaaacaagaaaaaagtttcattagttactccaagtggacatagcatctgcaaaatcaaaccacattacaataaccaaaaatccatttaattcgcaataatcgccccattatccacgctaaagtatatttgagtacaacttttgaaatagaaatccttgtcattctgtttcagtacaagaactagattaccctgttcacaaatacgctattaagaaaaatcattatttgaaataactgtgtacatcagataatttacaataatggttccgatttaggactcttaaaagaattctgacataatcaaatgaatattagtcaatatttacaaaaaactaaaggtaaccaaaattcaaaatcatttaggtcaattttaataataactctatagaaagcagagtaatgggagggggaggtgactcaaagaaggcaatctatgctgcattatttggtaatttggcaattgccatatcaaagctatttgcagcgttatttacagggagtagctctatgtgggctgaaacataccattcattctcggatactttcaatcaggtgctacttttggtgggtgtgaagacaagcaagaaggaagcaaatgaaaagtatccatttggatttggcaaggaacaatacttttggtcgtttgttgtagcactacttatttttggtgtatcaggagttttatctctagaacatggaataagttattttttaagtgagaatgatactcatgaaataaaaaatacattaataaattatgtgattttggcgatagcctttgtctttgaagcatattcacttagagtagcctatggaatatttaaaaagaggatagaagaaaggggtgataaattaagtttaaaagttttttttaccgatctaaaagaaaataaagatactgttattataacggtacttgtagaagattccgctgctcttttaggaataataattgcagcagttgcattggcccttgctgatcttactggaaatcctgcatacgacgctataggctccctcttaattgggatattgttaatgagttttgcaatatttttggccaaggagaaccgaggtatgcttataggtgaagcaatgtccaaacaagatttaaaaaagatatatgatgcagtatctaatatctccgaagtagagaaaataaattcagttcgtactatgcatcttgcacccgaagatgtcctaattgcaattgaagtatatttgattgagaatttgaatactgtcacaatcgagtccgttattgacgatattgaaaacaagatcagggaggccattccttacgctaaccaatcaaaaatatacgtagagatagcacaagagaatagttaaaaaccggtaactactatttagatcaggatgtattctcatatctttacatctaacagacattttcgattaaattgaacaccatccagcaatacaaaatttaaatcaattatatcattgcattaattcgttagtaacagaaactttctacgaaatctgtatatttcagttactccataaccaatatagaattttacaacatgttttaaaacctaatcaagcaaataatgatgattttgtcgattccagagtctaagtggttggaaattgattacgattattgattaggaaaatatttgttatttggcataaacaggtaatttaggtttcctttttctacgatcattaaaattcaatattgatgtgatcttgagctaaaaacctatttttgtaattgtaatccatttagatcttattattttttcatttttcatatgtttccgatcctgataaaactgattagatagtgtgtcaaaagaaagaggttattattattgtacccctgcgctgtgttatctcattcattttcttggtttcagaattacaagttatttctcaaactcgatgggagttgcgggatattatctgaaagttcttccctatgaatataatcgattaattacttgagaaaaatcaacgaccgtcttcttaatataatagttctacgtataaagagtattcagcaacaaatgaatatgaaattgcaagattttatatgctttctttacaataataaaatgataaatatacacaatcttttgaaagataatgaaaatggatatataaatcgattaaaattacagaaatatgtatttttagcacaaacctctttacaaaatgactttggctatgagtataatatttatagaaatggtccatattcgccagacctagcaaattattgttatgaaggattagatcttagtagaatatcgtctgacatcaacgagaagaggtggacagataactcggcttttaccgacagatttttgactctgtttaaagacaaggagccggagtggttagaggtagcggctactctgatagatagtactaattattgtgaaaatgaacaagagtctctgaacaaagtatacactattaaatcaatgtttagtagagattacattgataatatctggaatgaattaaaagataaaagtctacttcattacgaatccgacctcaaatcaaaaaactttctctccatattctaattattttaattcaaaatagcgggtttactacaacaaagttttagattatttaaagaagtgatcacagaattcaaaaatatttacttttttcttctgcatactaatgatgactaacgtagatagcctgttaattggatttcactttcttcctaaacattctacaattcctatttttacaagctagtgcccatctttgggatctgatttatcatattcgtaaaatacaagcatatttgttaatcccaaatctaatatgtaaactggtattcttttgattgtcaattgctggaaatgaaacccttgaataaaatgtagcgttgagctctttaattatgatgctaagagcatctagagcatataggtatgcatatgtgatacctgtcctttagacaatcttatttgtgcgtatgaattctcttaaagcagatgactcttccttatatgccttaatcgtgtaaactttcccatctggacattttagtgatacccttactatggtggtctctatatctgaagcatacactggtggttctatcttttctattttgcaatcagcagcaagtaatttctttaattcggaaatactcttaaattctgacaagaaaaatcacatactattattaattactaatttataaaaagtgctttggatgcgttgattaaatctacgagaacaggtaaattgtaatcgtattattttttatattggtactagaaggaatcaaatcccccagtatccattccaccaacgtccatatcgctgtaatcacctgtttcgcctgtatcagatgccgatcctgaatcatcagctcccgatcctcctgattcggctgcttgtgcatcactctgagtactctcagatggattcattgacattcccataaaagacatcatagaagtaaacattactgcgtttaatagcccagaaaatagcatcatcggcatccacattctgttatcattcatataactttgcatttgacccttattgccggtttcatagagttgttggagatatttggatttattgaccagttcttgtttttttgattccagtattttgaatcctgtttcggtaacaaaaacttcaattttcttgttaccaaaaaagcctttttttgtctgtttgatgattagtttttgggtttgtagatcatttacaatcaattctacttcatctttggataactttgtaagcttggctatgtcgtctatctttttcatacccctagagattgcgtctaataccatgaaatgattcggactttgactaaatccattatctggagacatgtatgtgtataaggaagaaattatttaagtcttaaatggctaattacgattttctaatgataaagacgaatcaagtcattgaatgaactagataatacgaacaaaaacattatcttcgagcatttatactttaaatactcggcgcttttgtaattttgtaaccccaacaagaatcattcaaatctgtaatataattttaaaaagccaatgcctaatttgacaagcctagtaagaaagcatactcggttacttttatctgaataaattcattgtaaagccatgatgcattgactttgcctcttttctatatttattccctttatttaccccttttctaagagattgaaaaaacagaaagttgagaaatgtgtagcttctcaaatctaatcattttagtcctatcatttgtttccaattattataggtattaaatacaatttttcttcaattaaaaatagtaatgatatatattctactgtaaaaagaatttcaaattcaaatttatttttgtgataccttacaagagatagagattggactatgcttctggtaacgatcattcctttattcaatagttttgcatcataagattttttttgagataggtcttataacccattttcaactgtttcacagcaaagtatagctctttgcaaaaactcaaaatgctaatcacgatgagaaacaatcattcattcatttaattatgagaattcgtgggtagtattggtagtaaccacactgtcatagagacagctaaaaaattcattctttgtaatctatcttaataaaacaacaattattgttagataaagtaatttgtaaatttttgactatattaaaaaagcgcagtcttgttatttaatattattctggcaaataaatttagtatcaagtatctaagctataatatagttaattttaactaaatagaatgattatattgagtaacataacaagaatacataagataagaattatttttgcgacgctacttggggtttctatgattgcatcacttgctacatttgattacatgatggttcaagcatctagtgggaaaaatgacaatgcagggcagcaagttgataagcaaggccaatgggttagccagggagcacaatgtgtatctggagaggatgttcggtttgcatgtaataacgttggaattcaatcacaagaacaaagaggccatttggcagcaggtcagcagtgacctttttttgatatactaatcaagcgttcataaatgtgctttctttatgatagtttcttggttctagttactttatttgtaattcaactttttgaattattttagattatattaaatgaagttcctcaaagccaaaaatatgactgggccaggggtctttcagaaggataagtttgggacgagtaatctcgtattaatatattgataatattacaacttatagaactaaaagaatagatacgctacatatccataaaatcatttaggtgtaaatttgtcccaaattaatctatcagatgtttaggatcaaccatacatagccgagtgttaactaccagaatgtaaatatgataagaatggttttgctattcatatttttttgctccttcttctcagttattatggggtagtatggagtattcaagacagcaattctacaatcacaataaatcctggagctacaaatagcgctagtcaaaatccaatagctcctagaaatacaactgtgtcagaggaatccactattatttggcttaataatgattccactccacgtctaatagtatctggaatgccagatcaaggtccatcaaacgtgttttatggagattatatttgtgccggtgaatcatacaatataaccttagataatgctggagtttacaactattacgatcccaattggagtcatattaaaggtcaaataactttagtaccaaacaacgaaacagatgtggaaaataatgaagggggctaagaaagtaattattggtcatggtactacttggtagtaccaattaatcatcatttgaattatttccataacatattcgatcaagccagtgtattgataattcatctcgattctaagagcaaatgacatatcatcggcaatagggtaaatcaactaactcgtttatcttctatagtgattcaaagtgggtgaggaatcactcaattcaaatcaaaaattcctctgcaggacaggatgtagtaacagccgattattcataaaaatagattttggctgtgacctaaaaaaaataatcgttattgaattatctagttctagaatgaatcaaatcctccggtatccattccgctatcagcacccatatcgctaaaaccacctgtgtcacctgtatctgatgcacctgtatccgatgcggctcctgaatcttcagccccagctccccctgaatcatctacttgcccttcagtttgagcactttccgctgggttcattgccattcccataaaggccatcatagatccaaacattaccatactcattagcccagaaaataacatcatcggcatccagctcctattatcgtccatcatgctctgcatttgacccctattaccggtttcatagagttgttgaagcctttgagatgtatgtgacagttcctgtttttttgaatctagcagtttcatgcctgtttctgaaatatgaaactcagttttcttgttgccaaaaaaacccttcttaactactgcgttaatcaatttctgatttcttaggtcatttactatcaattctacttcatctttggataactttgtaactttggcaatgctgtctatctttttcatacccctagagattgcgtctaataccatgaaatgattcggactttgactaaaattattatttgaagacataattatttatgaacaaataattatttaaactatagatgtttcatgtttgaattttatatctatcttgagaaacgatgtataagatccaagttgatgtttatattatctatattcagctggagcagtcgcattagacaggttagtacctaaattcgatgtcaaattgccagttaggcctggttcgattcctgctcctgtttggttattgtcaattggctgttctaatgctaatgcgggggcaagatttccgccaaacgtagtgatagatacaataactcctatcaatgtaaaaacattcaaaatcctcatagaattataggatcagcatattatataacatacatactcctattatcttcattttttgtaaacccctcctatgatatgatctgaggatttcatatgagaaattctagtgctttgcgatgtcccctgcgctcctctaataattattgtccataaatgtacattttttatttcgttgtactcatacgagctagaatattgtttgcaaataattgcaattgaaacttaatgtttaattctcttcaactaaacctccttatattgggttgtaaaggactgtgcgtaagatacgatagagttggcggaggaaaagaatctgtttatgctttgggatataaacggtgctcaggatgcagtctatacattaaattcagcggtacccgctgtccatgttgtaattatcctctgcgaactaaaaagagaaattaataagtcaagtgctgatctaaacaaacaaaggatattattataatactgggaaaattcttttggatgcatgacattggtaattcgagttcgggcgaatccaaaaaaactgctaccatgacgtttaggatcgacgaaaatgtattaaatgtcttgagggccgaatcggatagaagtcaaattaccttaaacagtctagtaaaccagctcctcaaacgctatgttgactgggatatgttcgaaccaaaagttggtatgattccaatagcaaagccaatagtggttgaattattcaaaaagatgagtaaggaggagatatcgaatatggctgtgaatatcggtaaggatgtcgttcatgacatcgcactttttatgaagaaccgtatggaccttgaatcatttctttcatggtttgaaacaagaatggctagttcattgactgaaactaatcacacggtgcaagatggttataatgtctacgttttaaagcatgaacttggggaaaattggtcattatatcataaaattatattagaattaatgttcaatgaaatattcaatatgaaagtagatattacgataagtagtacaacaattagattcaagtttagaagttaaatagccaaaaccgccaaccattttaatgttttctgataatcaactttatgatatttgtaggttatatcatatctgacaatatcgctgatcatcccgtcttaattagcgaattcaaagaatttatagaaaacaagcgaataatgaatcgatctcaagctccagatccagtaacgatactgacattttgaaattgaatctaatatgcgatgttcacaataagtatactttacggtggagtatgtgttcttatgaagcttggaattcgcttccaatcatcttgttgttttgtaaatcctcatttcttgcaaaaaaccaaggaatctgtcaatcacaagacttatcaaaggagaggaggactttctggtacgattcagtaggatcatgtaacaacttgaacttccaaaaccaagataatggtgggaacaatgtagtaggacaactagattaaccaccaaattaaccacatttttttatttttttctgaattattaattcaaaggatacaattccatatatccatgccatttctaatggaatgaaaggttgtcggtaacaattagatggaaatctgttgaaatattagtaattaataaataattattacttgcttatcaaaaagatatactaattgatctttagtatcttagcttatttaaaaaacctaatcgttgtcaaatgggaaaaaacttttgatgtcaaaatgccaatacgattggttgtttgatctgcgttcaatacgtttgaacaattctgatttctggctctaatttctaaaaagagtctattccttcagaaaagagggttattcttttgtttttcgcctactcaacgaaatgttcatcctttattgtgaagcatttgtataggatggtttagctatcatatttaaggaaatttgaattacaaatggttagcattaagtaatactactattggtaccctcatggcatctcttgataggaatataataataatagctcttccttcaattgccagcgaattgcacacctctcttattacactcgtctggatagcaattgggtattgggtagtaacggcttcaatgttattgacctttggtagacttgctgatatgtttgggagagtcaaattgtataatctaggatttgcattgtttacaattggctctggactttgttgtgtgtctcaaacgggagaacaattgattgtttttcggattatccaggcatttggagccgcttttattttttctaacagctccgccattctctcggactcattcccagagtctgaaaggggaaaagctttgggaataaatcaaatatctattgtagtagggtcaatcatgggcttagtcatcggtgggggtttaacgtcatattttggttggagatctatattctggataaatattcctataggaatatttgctacgttatgggcattctcaaaactaaaagaattaggaacaataaaaaaggaaaaaattgactggctgggaaatttgttgtttgctgggggattggtagtcctgttggttggaatcactttcggttcttttcatcttttaaacatatttgaaattaccttgtttatatcgggtgggatctctttgttagtactattttatattaatgagaaaaaagtgagtttcccaatgatggacctcaccttatttaggcttagactctttaccagtagtaatattgcgattttctttaattctcttgctcgtggagccttcactttcgtgatggtattttaccttcagggaccaacgatgctcctaaacccattagattcgggcatttatctgattccagtttccatttcattggcgatagttgctccaataaccggttggttttttgataaatataagtctcaaattatctctcagacaggattgataatttctgcgataggttttattttgttgactgctatgggttcaaagatttcatccgtagatgctatactgccacttgcactcataggagcaggaatgggtatatttacgtcacctaatcgagccactataatgaattcagtacctccaaatagaagaggggtagcagccggtataagcactacactggttatgacgggaagtgcgtttagtatcggattggtctttttgatattttccactttgctaccctcggagtctgtcgatgtcatcttttcaggttctactgactatgcaagtcataattcaattcaattcaatgacaccaacatagacaaatttattttatctattcacgtaatattcatagtttctgctctattgatgatatcttcagtattgattcagcgtaaaatgaaatgagcgaatcttgggcataacttgtttctttttcattcattttaggatggatatagccttgtgcgctcatattttctagattaacgattattagtaacctattctaattagatctaactatactatttatattagacgacatccattaatctaattagtgataaaaagattatcatcaaaaacaaatgagaatttgcagatctatttgttaaaaccttcttgcttttctgatgcaccggttatttcccactggttatcattaaaggaggagttttctaaataataccatttgatgaaaacataatcataaatgcagttgagaaagtcaacaaagatgtagtaaatatagccagcgtaagaatggtcaaagatcaattattacgaatatttcctgtagaaggggtcggttcgggagtaataatagataagaaaggttacatattgacaaataatcatgtcattgagaaggcaaataagttaaaagttacaaccaccgatggaaacatttatgacggaatggtagttggaacagacccaattactgatttagctataatcaagatcgaatcaaaagatgcgttatcttacgcggaattaggcaattcagatgaattgaaaataggacaaatagtaattgcgatcgggaatccttttggtttggacgggggtccatccgttaccgcaggaattattagctctttaagcagaaaattgcagtttgagcgaggtattatggagcttgttcaaactgatgcatcgatcaatcccggtaattcagggggtccgctcataaataccaaagggcaagtgattggaataaatactgcgaaaatgccatatgcacaaggtataggatttgcagtaccgataaatgttgcaaagttgataataaatgatttaataatgaatggacgcgttaccaataggccatggataggtatttccacaataaagattacaactgaattggcaaatacttatagactaccaaccaaccagggatctttaatcgcagaggtacaaagagatggtcccgcttacattgccgatttgcgtaagggagatattattgaatcagtagatggggtaaaaataattgatccatatcagatttctaaccatatccgaaaaaggaacattaaagacctaataattattcaaatcaatagatatggaaaaaaaatggataaagaaatccaattaatgcctcatcccacaaatcttaattaaatagttcctagagtgacgttttctggcttggctgtagcaagaccagactagaccatttctattttagatacacatatgcccataaccatatttttgacatattcttcagatgaatttgttcgatactagtaggaggttcttattcatagagagttactagattgctattgaccgatactaaacatacttcaaaataaaacacaaaagtttgtcttatctattgctcatttatcatctaacataaaccgtgctccaagtcttctaagaatgctattttagatagtggttttctctccctgggttttgtatttttgactttgaatttttctggtaagctatcatttgtaccttgatatcctatggctatcataattcccacttcataatcgtcaggtatcttgaatacctcttttgctaacgttatgttaaatccgcccatctcatgcataatcaaaccttgattaaaactttccaagaacatattctcatttgcagctcctaggtcatgaaaataaagtctatttggatcttgactttctgtataggttttttttgtgatggcgcaaatcaatataggtgcttgttttgcaaatgaatttgattcaagtagcacagattgagcctcaaataatttactgggattgtcactagtaaaaacaatgtaacgccagggttgttcgtttctagaagatggtgtccaccttgctgcctctaggatcgaaaaaagttttgttttctccacctttcttgtcgaaaatgcacgagcactccatctttttcttaatagatcatgaataggataatcagttatcgcatgattatctataatgccctttttcaaattcgatcaataaataatccataattcactaattaaagttcttaactgcctactgtttgaagggtactatgaatagaccatgttaaatctcatgacctaatttttcattattactttcttgaaattgtggttttccttcttttattatttgttaattttcttacttgtactccatcttcttcaatttcttgatcagcttgctggtttcttatgttcaattttgcaacccggggggtggccatggcaaattgtacatgaaaacaagtagatgactgacatagcgaacaacgtaatttttcctcattaaaatggatttccgtaactttattttctttagagtctttaatgtaaagagtgtccctagtgcacccctcctctgacaagaaaggggcatagtgtctcaaaaattcatccttttctagtatctcatgtagtaactcgtttacaaatcccccaaagtgttcattaatatagggatttctttctctttccctcttccatttacttcttaactcctttacaatgttaactcttaaagtaatcaattcagcagaatttgatctaggcatctttctaatcatgatacacgcaagcaatatataactttaataatcaatggagtacagtaaatacagcatattatgcagtgtagataagttagattccatacctttttctttatatcttggtgtctaaacagatgaaattaaatacctaaagatttctttgttaataatgcatactaagcttgttttttttggtatccttcctttatccttattactattattgatgggatcaatgaactttcaacaagcatatgtcgaagcacaatcaaattcgacccaaacattcacttccaccaacaatacatttaatctcaattatcctttagactgggaaatagctccaagaaattctagtttcccatattatggagaaactacagcattagtccttcgaccaataatggacgagcctgtcactccattaaatgaaactttttttagtatttctgttagcgatgtaaagaggttgctagaagataataagtcattaccagcagagttcctagacaaattagtcgctgataagataaattcttttgaagatccatcttcaatatatggaaacttgaatgtaaaactgcttggaaataactacaccagacttggtgatcagcctgccaaagaattgaccttccttacccaaaatctcggaaccttcgaagtcgatacatatgctatctataatgaccaattgtatcatgtcaatttcatgggtccacagtcaaaagtgtccgaaatgtataaggagtttcaacaaattaaagattcatttagattcttaccataggattctatctatgagtccgctaagaccaccttaattagctactcatattttttatcatattatgaaaatcttcatctgatactttgttttttatttccattatatgttctacatctttgcctgcaagatatctcaactttggattactgtcgtttatggcatccaggacaaccttagcaacatattcagggggttcgccactctcaattaattttttcatcccattttccatattattcataaattgaaagtaaggcgaattagggtctttagatttttctgctaatactgcagctttaatgaaattagttttgattatccccggctctataagtatagttctaatcccaaatggttcaagttcataagatatggattcggttaatccttctatagcgaattttgaacttgcataggctgagcttgttgctatgccaaaacggcctagtcctgaacttatattgacaattattccagcgctctgatctctcattatgggcaacactgcctgtgtagcccgtatcaatccaaagtaatttgtgtcaaactgtacctttatttcatttattaaaagatcttcgaaagctccgctcaaaccatatcctgcattattgacaagaatgtctattttattagcctcatttactatagtttcaatggcttgtttaactgacatatcgtttgtaacgtcaagctgaacacatcttaagggaattttttctttatctacaatagatctcagagttgaacttttctgtaaatctctcatcgttgcgtatgttttgaatccgtgtcttgcaaggattaaagatatttcaaaacctattccgcttgaacttccagtcacaaccgcaactctactttcactcataaatgtatgtaaaaatttcaaattaataagttattcaaaagcaaacaggttgacttgacaacgtatttaatatcttcctcaactcccgtcaagtgttctatttctcatgttgatgtaaatatctagcggcaagaacaagtttttttcaatattccacgtaggtagcttgtgtgcatgaatgattagcggcaaatctctttgaaacctgagctaattagttcaaaggttttgtactaaaatttactaaacagatatgtgttttcaaaactcatttggctctaatcttggtatcaattgatcaaaaaaaggttttaaattatccaaaggagatggatcctttcgaacaaatccaattaaagatgatgattaaaaaatattatctgaatcgtactttattgatccatcaattgcagaatctattaaattaaaaattgatcaattttgtaactattgtaacggactattgtgatgaccgacaacaatgtcttctttgataatgatacaacaatgacaacgagaatctatacaaatctttgatttcttatgattacagatagaacacatacataccttagacagatctgtatttgttcttaccttagacagatctgtatttgttcttaccttagacagatctgtatttgttctcattttattgattaaagggtggtactgactatacagcgagattatgattcctaatataataatgactgtgcccgggagaaaggttctacctatcataagaaaaatccctaacgccatcatgattatacttccaatcatcaaaatgttcatgaatttctcaggctcccatctattctatcgtaaagttattcctaattggtaatctcattctctggattcattttctttttcctaattttcctaactttttcaaggatctgagctaactgatcttcagaaatttttgaaatccttgaatcacattcgataccttctgcgtccaaaacctgttcagtaatttcaacaatttcgttcttatgggttatttcctgctctgttaacatgttcaaacttgcaaatctgaaaaaagcgaaatcgctcatgaaataatactatgtgtagtactagttatatttatggactcaacattgtctggtccgctgtccctaggttttatattttacgctctagtccatattatccagaaacctcaggcctaaattcctttgtatacttttagtaggttagctcttagtgaaggattttttgcagaaaatggccttaaaggaacaatgctggtaatgaacgaaatcatccacattgcaatatttaccgtatcatattaccagatcttcattgaaagcctttaaatcgatctacactaccattttggatattccagaataaagatcatgtttgatttaattttatggtagaaaatccatttatattctaattattatttgtaccagaaaagttaaacttgaaatcgattattaatttcctgctgtttcataatgtttatttattgcgagaatttcaaactagatggtgaatgagataagatggctgataaaattaaatgttatcatattttagtaaagaaacaaagtgaagcattattgatattagaaaaattgaaaaaaggggaaggcttttcaaatctggctaaggagttttctattgacaaagggagtggcaaaaaaggaggagacttgggtttctttgggaaagggatgatggtcaaaccatttgaagaagcagcattcaagttaaaaaaaggagagattacagctgagcctataaaaacagaatttggatatcatataataagacggtctggataatggtaaaaaaaactttatgatttatatccagatggataagaattaaataattttgaactaattaatgagtctttgaaatcataaatatctaatcaaatgataatgttttccggaatgcaagtgaaattgactaactatcaagcatggtttgccaatttaatttctttttttagatcacttttcttcaaaggcaaaaaaattgttacaaggttttcttttatctcattgattgttggatcctaaatgatttaaaggggtttatcatagggtttaattatatattggattttaacctcgggtactgtgcattttcttgttatacaattcaaacatgaaccttatgactagaccaaggctttaatttcaaattatagaaaatgaaaaaaaccaacaaaaatttggtatattatacatagaaacatcggtgtgttcggataatatgatttgggatgtagaaaggatatttttaaaataaattggtccttgagtagcgtctaatgctaaaaagagagttgaccacacctagtaattctgctttacccagccagaattaattgaattttgatttggtttagagatacggttgttaccatgcaaaataagttaatactttgatttccaccctatgttagcaagtatatgcacatgttgtaatttcaatttttattataaaggtattatttgcattatgacagcagtcccactttgatagcagttttacacgggaacacgagtacacttgctatctagcagggatcataatgcaaacacggtttatagcacctcaggtaatataaactgaaatattggttaataactatcagcaatctttgtcataatagtgatgattaaattacaaaaaagatcgctttaatatgggcatatcttaacaatattaacattagcaaaagaaatgccaatcataatatcaaaggattatcgatttttacaacttttacgtactaatcttaaggttttgtatagctctagaaaaagaaagccccaagacaagattcatgtttctgatataatctctggttcctgcctacgtaaggcattttatgctcgcaccgttaaagactatgaactaactgtagaagatattgacaattttgtgagaggcgagtcctctgaatatattcttgtagggcttgcagacatcggtgtaagtcaaatggaattgttttttgaagataatctgatagcaaggcctgatctgatgacaggaagccaatctcacaagacagaatctaaagacatgatttccactaaaaaggataaagaggctgaaatcatcgttgaatttaaagatacaaagagctttgagaggttaaaaccagataataagcggttcaaatcctatcttcgtcaattgttatattatttggtcatttctggatatgatacagggatactctgtattcgttacgcaaataatcgaaaaatggtttggataaagcgagacaatcaaggagattattatttttctcccaaaacaaaaaatcaaaatgatgacggaaatttggctgagatcgaatcgtggacggtaatactagaaaaaggatctcctatccgggatgttttgaaagaagaaattcgaacgagggtttctttactaaaatcagcgcttgataataatgccgatgctcaattgcccaaggtggctgaagaatggaaatgtataaaatgtccatttaagcagacttgtaatcccgctagtgtaatcaagcaggactctgaaatagatattttagatgaaaagggattaatagtaacaatagaatccaattagtttagtcaaaattaaagagtaatatccgtcaacaatttacttgtccgtcagttcaagtgcactaagcagtttgcgaatatggaatgtcattagcgctcaaaaattcagagacttgccgattttaatatttactaaattaaattaatttgctttggcaactaacatacctccaattcaaatctaacacatcctcttaaatgcccataccaatttcccgcttggacctgtaaagttaaattgatattttgggaaataaattttctcggccagcgatctcgttgttttaaatatgactagcttgatttgcatatccttgtttattgcttggaccaggccactacaaaataacattatgtattttccaatcccataacacctgtatcgttgatcaatacctattttctttattaaaagtgcgcaggttggtacttggtaaaatttctctcccttaccattttcttcgtactgaggaagtaaatcagattgtttcgtatgcaatcttgtcagatcaatagaaaaaaaaccaatccaatcatcaaagtactttatcacatattttacttcattagtattagatttaccgttaaggatgtaattctcataatactcttgaactgataacgggtcctcaccgtttgtttgcctgaaatctatctttggtagttgatgtttttttggattaaaaatcttaaattttaatccgtttggatcaaattgagtcgtctgagtcatgtctatgtttttcataaaaggcaatagcttcagttaagaattcttgttctatgggattattcttaccatttaaatattcagaaatttggtgatattcatcatcttccaggaaaatatcagaatatagagtaaacaattttgacatgattatatatcgaaagagcactattaaaatatcgttaaaaaaatctaatctttttatttttatcatttcagctactgcattcgaattaagagtaaaagcttaagacccggtcaattttgatagatacaaaggtgtgatccatccgatggatacctaacccataatggactcaaccatttgaacaatcaaatatactatctattgtttctagtgatattaccatagctaaggatcatgtaaacacgttgaatatttctgtttgtaaaacgatcatgcttgttatacctgcatgttaatatagtagtcaaatgtccagtcataagctgtttacctacccggtgttcagtttcaaagctagattcgtgaacttgaatgactatctaaagatatactgctttccaaatgagccttattttacaaaattataggctatcttctagaggatcctaaactaatgtcaattgcatttgaaaatgaatagttacaatgccctcgggtttaatacattttatccctgaatcattttgggttgtcttggtttaggctttattctaagtacgatcctaaagcgttgggtttaaaaaccatggtgaaaaataatccatgtattaacaatgaatcaacaccataccgacattaccgaacctcttatcaaaaatcttttagaagacaagaacttggcatttgttgctaccctaatgaaagacggatctcctcagataactcctacatggatcgatatacaaggtaatgagatttttatcaatacagcgctaggtagggtaaaacagaagaatgtaacgagagatccaaggatagcggtatctattgcagatcgtaataatccttaccatatggtaaccttgagaggcgaagtgattgaccagattacaggcgaactggctgacagtcacatagataaattagcaaaaaagtatctaaataaagataaatatcctttcagagctccaggtgaaaaaagagtaatattaaaggtaaaacctacacgagtggcatacacataaaatccattgaatatctgctcaactatgaatagaatgtaatatctccgaacaagggaggaacagttgagtttgaattttattataccaaattcaaatcttaaaaaaagtattagacacacaaatcaatagcatttatagtatataccaagggtttagaaatgctggcagtgagtgccatgacacccaacccgtctgaataaacaaaggtattttaggaagtatctcaccttctgtcaatatttaatatcactttgtaagtcataattgctaaatattttattatttattacttccgacttacttgttgctcatgttcattatttttgttagaatttcaaatatgctagattgggataaaatctatagcatatagagtatgtctgaagaatgggtcggatatgcatacaggatgggattattgagatctttggcagtaagtcctaatcttatagccatcgaaaatatgtttatgacttcctccgcatgagatcccagcagatgagcgcctaaaattctgtcactgccttgctcaattaatatcttaaatccagaatgagtttcaccttcacgtctagaagaattccattcagaggtattcatatgattaattctaaattgaaatccttgttctactgcatctttttccattaatcctaccgacgcaagaggaggaatggtaaagactacacttggcagaccagcataatttatcttactgatatttccatttaatatattagttgatacaatattcccttcatagcttgctacaggagttaagggcgcacctccacttgaggcaacatcgcctgctgcatatacaatagggtttgaaatactctgaagatattcattcacttttatccctctgggggtatattcaataccaccaaccattagatcgagttcttcaatatttggcactctgcctgcgccatgtactaccatatcagattctagggttcttgtcaatttgtgctctcttggggaatctactatagaagaataatgtacgactaatttgccatcactttctaatgatgatgatgaagaaattttatctattttctcgacctttgtctctaatcgtacatctattccaatatttttactcttctgcactagttgattaacgaggtctgagtcaaaatgttctaaggcttgtttcccacgatgaaaaattgtgatctctttgaccccagagcgggcagcaatatgcgcaaattcaaatgatatgtatccgccaccaatgaatgcgatattgtcaggtagttgataactttcaatattcaaaaactgatcacttgtgattacattctctaaacctggaatacctaaatttacaggtcttgctccagttgctaaaaagatgtattttccctttataatatcattatgtgtgtcttcattcgtattgttgaatttcactttaattgtgtcattaccaataaatttggcttttccatgaatgggaataattccagccttgatataactgtcttctctttgttttggaaaaggctctgtaaaggttttcttaaagtttatcaagtcatgccaatttagatggactttgtcaacttcgcttatgctcttattttcaagtctatggtttgcatcaattgcttttgctgtttcaacaagaattttttttggttcgcagccgcgtaaagcacaagtacccccaaaaggtagtgaatctataatggcaactcttagtcccttagagcggcaagttgatgcaacggtagtgcctgccgttcctgtacctattacaattaaatcatatacgctttcattgtccaactagtactcaatcctaaattaatcaaaaaaagcagactcctttaaagttttgagttttgaccgatgttaccccttatataaccaatttaaatcaatatcatctatattcacctacccttgtggatgcagcagaaccactttgtaacctatgaatctttaccgaatttttcaagcgatatggcttcacttgattgatatatattaatagaattttatcgtggtattaatcctaaacagattaacgagaatggtgaaagtgttcctgtcccttccttctaagattcgactaaagttgcaatacaaatactacctgatatagatagcaagcatgtccaattgcacatggaatttaggaagtattctgcaaaagtttttatctacttaaaataaggttattttattatacaattccataccttctttacgcacttatcaaagaaaattatcagtttcaatttttctataatcgtattttttttatttttaatcttccttgcatttgcgtgcccaacaacctttatttaccaaactgctaatgccgtatcttcaccttcatttaaattacaggaaatgatcaacgaaaatcgtgattggtttcaaacttatggtaatagcgaccttaatttaaaaaacaactatactgacatactagctgtaaattatcttagcgatggtgaaaacctaaatgccacactttggttgaacgctggcattagtaattatacggactttagttacaaaaagcccttaaacaaaataaattatggaatgcttatagatgctgattctaattccgaaacaggatatagaggagcagattatgatttatattatgaattaaggggtggcaatctaagtgcctatctatatcaactttcatcaacaggaggctacaagttgataggttcaaacacaaacttcacggaatcttatgatgactctggtgcattcctgggatctgtggactttgatctaaatttggattcaataaataatccagaccaatacaatctattattctattctgcagagtcattcgggtctaacgaagtgaggcaatttacatcttgggttagcattccgccacctacattacaggtaacaacatctccagaggatatctcaataagacagggcgaaagtctgatggttccagcaagaataaaatccaccacaggattttcaaacgatgtagttaacattacactatcaggagataaaaatagtgagtatgccatagcctctggtttcaactctagtgaactaattgtaaatgtagaaagaaatcaacctccattatttaaaattgacgttcccaaagaaactcctttgggtatttactcaattcccttgattgtttccataagagagccttctgaagccgtaataacaaaaccaataaatgtgaattcggtggggggaaaagtggacccagaatttgaaatctctaaggagtatccaactgaaggttatttgactaaaccaataaacttgaccgttactgtaattgcgccaatgaccccaagtgatctatttaaggaattttggggaacttatgggtcctttatagggatttttgccggcgcttttataggcgcttttgcaaaggtgttatttgataaaagaaagaaagaaaattagattattataaaaataaatatctattcttttttcttctaaatgtaggcaagaaagttacagtttttgcctatttttatttttccaaattagtttaggataggctgtgaattagagaatcttactttagtcttggaataattgaatttatttcataaattcctggactacgcgtagctggtaatgacgaattttgactatttgtatctaattattaagaaatggtaatcaaatattaaaggacactgctataataaatggcaccaattcctggatctatttctgtgtataagaatatttactgtaattggtaattatattggtaactgagtcataatgactgttagaatcctatagttgattatatcttagcttctgagtttgtctgacaaattcttcttaactgtaggccattcttctctaataatactatagcaagcagtgtctcttatcctcccgtttcgcattattttgtgatttcgcaaaattccatcctgctttcctcctattctttcaattgcttttcttgatacttgatttaggacgtcagttctaatctctactgctatgcagtttagcttttcaaatgcgtattgtaacatcaaaagtttggcctcagtatttacaggagacctacgataagattttgctatccaagtgtggcctatctctagcctataattttggtgatcaatattaaaaaacctagtcgtcccaactatgattttcaattgcttgtctactataatgaaaggtaagctagtattatcatgttttatcatattctgcaaataaatggacatttcttcaatgctagggaatgatgtgaatgggtttttccagatttcaccgtcagcagctgcgctacacaaaccattcaaatcatcagatatgggcggacgaagtactacgtgactgtgctccatagttatatcatggacgtctagcatataccaaacaagatcaataattcatccttgctttattaaatacagtgctatttcatatgatgatttatttgttgatcagtatcactatatgggtttcacaatcaaattcaacaatagagcctgaacctactttttttaaaatgacattacaaatagactatccatcagaatatctatctgtgggtggtttgttaggctgaattttgtcagacaatggatctcatagtacttaaaaaacaccattaatatagcatttttacgatttttaataatattgggataaaaaatgtaaaccctagtaataaatatatcctttttgaaaatatacactatttgtataataatgttagactagacatgtttgatgttcatttgcgccgtttcatctcatatattgaacgaatagttgaactaatgttatataagcagatttgtctattatacagatacttttgggtaattatgacagtactggtgtctcttggtgtcgcttttaccattagaacaaaattaatggtaaacaccatacttgaaatatatcataaaccacttataaacaagattctgttcagcccaatgtgtggttgagttattttaattccatagtccttgatattcgcgattcatcgtccttgccggactaaaaaatatgccatcatgatagcgtaaatatactaaatctttttgcctgtatgtatttttagataaaagatgattgcgaattgccttattcgcttagggtcgataatcccacatataacgataatctgcaaacaggcttgaccagttcataacatgttctactttgcactgtaactatcataaaaaggagtcatcaaaacattcggttctgtcttttaggtactgcattactttctttcaatcagctatgtctctagacagaaatgatgaatgtcatgctttaatttaagaaacaggcttgaggatacagtaatccacttctatctgttgatacttgatactttcgatgtgcctcgatcagaactggaattaattatatggttggagaatatttcatagaaacagtattataaaaaggaaaagatgtatataaacatctagatatccagaatatctccttctatatctttaactctccatgaatcgttcgtaactattacctttctatattaccttgtaatcttatactgatatctcaaccagttaattaattagcctccacctttgagattctatgttataaaaaaggaagataggaatagatttataaaaacaatacccttttaaatacataaatttacatagaatcggtaattgtctattaaatcataaaagtttggcgagttagatataatttccttaaaacttttgtataattgtttagcttaatagtctactaatatctagttgaaaacccgttttatatataaaatgatattagaattctaatgattaagtttactataatgatggccgtccttttggcatcagtaagcctctatggcgcaaacgtgggatcaatatatgcccagaacaacgccttgagtcaaagtggaaattcagaagcagaacagacgattgcacaatcacaagcatccgaacaagattcacaatgtgtatcaggagatatcactgctctctcgtgtaacaaccttggtttccaggtgcaaagaaatggtgatgatgacaacggaggagaaccgaatccaccgaatccaccagatgagagatgttcagttgattacgtatgggacgtaacaacaactgctgaaccagaaaatggcgacggtgttccagtgggaactataatatgtttcaccacagaccctgcacgacctggtacccaacccgctgaagtaaatccaccaagaggagatagtttcaacactaccgtaaacccaaaccagtttaacgacaatccaaactgtaacggcaatggtcagcagcgtgctgaagtaacatcaggagatcctcctcgacaactacagatgggtgacccactctgtgttcaagtagatttgcccccgacctaagattaattagaataagttaatcaaaaaatcaatttttcttttttttaatattaatcagcaagcaatttctatcagtcatttccaatttttgtcattttgagtcaagtcgaaattatcttggataatatctgataaactcttttagattttcatgtgatagggcgactacgatgctattcgactcagaatttttttatctgttcttttctattttgttttgcagaatcaaaaattgataggtagaatcaagaaatacacagggaaaaattctaaaattaacgttgatctattagactatcgattgaggacatcggaaatagttcaagttccgttgtaatgggacatcatactttatctttgtatgactggatcttagggaggaaatgaagaatgaatacgctgagtgacttttataattggccaaagatattgattgggaatgttaacaatgttatactagcaaaatctgtcgtcaaggtctatcctccttttgaaaagacgagtcaattattatataaacgaaatatttcatagaaacagtattatatttattactttacaatctacgtaattaggatagagaagagtgacgatagagctatcagtgggtgcaataataagatatcaatctattgaatttaatagagatcattctgaatttctccttttgagaaataaacggggattttggggatttccccaaggtcataaagaaagaggggaaaatgaaattcagacattgcagagagaagtgcaggaagaaactggaatagttgatctagatatacaccaatacataggcaagattcaatacaaatactttagagctgatggaattcgatcagagaaggaagtgaaattttattttgcaactactccagttagagaagtcaccatatcaaatgagcacgaaggattcaaatggacaacttatcaagatgcgctttcgcttctcgaccaccgtcaactgaaatcaataatcctaaaaggtagaagaagaggcctttattaatacacacatttcaaaagttactgtcctactctgcatactctaaatgctatgaaaataattttatacctacgttttattaatagaagcggatatagattaaaaaatggttgctggtaaaagaattgtgctaactgccgattgtagtttgatgaccaactatagaggtaattttctttatgggttcatagcatgtggcccatatgaacttgttcctgaatttgtatttgataaacttttttgtccaagtgttgaaactgataagaatactggagaaataaaagttgcccaatgtggtctgcgtcgtattgaaagtgcattgattcgagagtacgataaaagtgaagtatttctagctcatccagaaatgttggaaaaatgtattggaccacaaaccaaggttgtaggaataaatgtcatggatccgttgggaatggctccggtaacaaccacaatgtcacctgaaaaattatcttatgtggcaatgaaatttaaaaaaatgtgtgcttccattattcaattaaaaaagaaatatgattttaaagtcgtggttggaggtaatggctcttgggaattagccaaacctgaaaggatgaagattcacggaattgatacagtggtgataggtgaagcagatgagttagcattggatttgtttcatgatctagaagctggggatgcaccagaacttcttcatacgtttgtacgcaatatagagaatattcctgttatacgtggtccaacaatcaactcattaattgaagccatgagaggttgcggacggggttgtgatttttgtgatgtgaataagagatctaagaaagatattccattagatagattacaggaagaagctaaaataaatataaaatatggctttgattccatctggctgcaatcagatgaaatgttactttatggctgtgataataaagactttataccaaatcaggaagcaattttagacgtttggaagggactaaagtcggtaggagctaacttcataggtactactcacatgactttgtcagctgttgcttcatcccctgatttgataaaaaatatttctcaggtaaatgatatggaaaacaatggtcgctggcttgcgaccaatttaggagttgaaactgttgccccgcggatggtaaaaaaacaccttggggtaaaaacgaggcctttccaaccagaggaatggggatcagttgtaagagagggatgcaaaatactaaatcaaaatcattggtttccagcattaacattgataattggatggcctgatgaaacacctgatgagacccaatatactattgatttgatccaggatttcagacaaatgaatatgaggggattagtcgctccattattgtatcaggatttctctgagaaaaattcaatgcattttggaaatttgaatgaatcacaatttgccctcttttggacatgttggcaacataatcttagggtaataagtgacattatacctataattattcgtaacaaatcttacggccctgcgatgaaggtatttatggcaatgttaataaaatttggaacttgggccataatgagatatttgcgtggcctgtccaaaggcttgtttgaaggtaaacctgctgaagatattgttgcaaagtatgtgcgaccgcgttctgtgaccgcagcaatgcctccaaaattataaaaaagagtttattttaaaactctattttatgtctggtttatattctaggtttgaacgaaaaaataggaatagttattcctaaaattagaccgaggagaggtaaaaaatctagtgtgttgagctgatctggctcaatgctgcatcagcaatggtgtccctcttaggtgtaatgacaataaaataattcttatcagctctttccatgacactgactagtttgtgtttttttgctgagatatcaaattcgtacattccgtgctcaagattcccctttgtataaatcatgagtaatgtttcccctgataacggggtaattgggaccattgaaaaaacatatcctttgtaagaactaatgggtaggatctgtttcatatagggtgccactgaaaccaaataaatcaaaacatcttcgatggtttcgaattcttcaaattcaaatttcatttaaattaactatttgaaagtaggttaaataaactttataaaaaaagtttatccgtacgattcaaatttaacgtcaaaagtaccatcttttctcttgttcctttcagttacaaaaccctttggtactagagaatctagaaccccatctacggtgccctgccatccacacacataaaaagacgtattttgcggtgtaattttctcacccactagttcctccaagggtgatttatccttgcctggctttggacgtagaaaggtttctactctccccttatgtccattccatgatctattgaaccattcctggggcctgctgatacttgctcgatatctaaagttccattcactaccacccttctccaaactttcggcctccaactcggttaacaattctctataactcaattcatcgacatagcttgcgccgtgaagcactacgatttgtcttttagtcccctttgattttaggtgtaacgaatatgatataaagggggctaaacctgttccgcctccaatcagtactaatctcctattatctggactaccatcaggcattttttcattaattgtaaaaatacctgtgggcctcacccaattaatttcgtctccttccctcttatcaaataattgtgttgtaagccttccgggcagtggtttcttaacccatcgtactacaagctcaaagtgttttttttgttctgggggtgaagcaatcgaatatgctctccttattaccttaccttcattaggaacatttaaacccaaggtaacaaactgacccggtttaaagtctgggacttggccctcgtttggtttaacatgaaaaatcgcaaggtcttcttttagaaccctgatatatgaaactgttgccttattgtctactaccataatattctctgttttgagccaagttagttaaatattttgttcttattatttttaaagtaacatttactttcatttttgtatcagggattacgatactcagaatgattttgcaaggcaactcataaattaatctgaattttataaggtcatgatgattagaaactacgcgtggtaaatataaaagtcggtttagttaaactttttgattatattatagtaaggggaacccttgtgtctttcaatacatttttgacaaattgatttgtcgccgtattttttatgacaggggcaatcgcaattcaaattcatattggatcccaaataatactctatgagaatttgatgaaacatataaatcgttttatgcaatctttacgaaaatacagaaattaaaaatgatgcaagacccacaatcactaccggtttctaattttcataaggtcaagttttatgcacaaatggtatcaatgttagaatttactcgatgatctccaaattttttgttaaaaagcagatcagaattactatatagtataaggtactgtctgaatatgactgaaagtttgactgaatcgatgcattcgtttatttctaaatctgttatctcttctacaacctgtaaaaaatatctggcttctgatggtatttcatctaataatttgttgttgaaggatcaaacaggaaaagtattgcttaattgcaagaatgttagtgttttaaaaggtaaaatagacgggataggtgtttcttttgctataactaaaaatctagatgagtatcagtttctaatatgtaattacattcccgccttacctgatcacgatatgttcaagttaaaatttcaaaagatgcggttgcttattaccatgtttataaataaaatggtcggtgtgttacttcaatctaaaataaaccccaaagccttggctgacttgaataaacacggcaatgctatattgttagaggtttctgaattaacgcatgaatttcgtgaaagagaccaagatgacagagtcaaataccttctaaatgaggaaaatatggatatgctaaatctcaaaatggattattttatccaatttggtgctactgaaatccaaattaataggatcctgttgtccatttatggatatgatatagctgattcagcaattgaatgaaggtgtcatccatctttaaagaattcaagcacttctttgctgtgaccccttggtttgacacttgaatatattttagcaatgcttccagtttgatcaactaaaaatgttgaccttgtaacgccaaagtattccttacccataaattttttgagcccgtagaccccatattcctttgaaatttcattgttcggatcggatgcaagcatataggggatattcatcttctctctgaattttgtatgagaatcgttagaatccgggctgattccaattatttcgatcccctgttgttcaaatagagcatagtctttagtaaattcctcagcctcggtggtacaaccaggagtaaaatcttttggataaaagtaaataactatctttttgtgttttaacaggtttgacaatttgaattcattgttctttgggtctctgtattcaaaatcgaaaggcttgtcgccctctttaattttcatcatattatgatctttttggtttgacatactgttaattgttaggacaccaaaaatacatgtttgttttcatgctgccatcctgctcatgatatatcttaatttattgtctgccattgttcaagtattaaccaaatacaaatgtgtaaaaatagaaattatctgtctttggtaatatttcaagcacatgaatttcaggacttggcgttttgactatgttcataatatgtggccatgtgatttcgatataactcgaattactatccttttttacatgatatcctaattgttcatccgttaaaaattcaccatccagcttaacatttgctattgcaggctggccgtcggtactaccaactattacgtttacatttgatgccatattgtatttgaagactattgcgggatctttttccttatggtcaaatgatgcctttatgccctctttatcccatctccattttccttttaaatacacggtattatccaacacggtttgaggcgcagtgaacacattgtattcattaattttggctttttgattatttccaaaccttctgatccgtgagtaacctacgcagatctcaggggccatgccgttaaaatgcattccgtatatcttagtcacctcattttgattgctgttgatctcttgttccttttccttttggttgtttaaatcagtacttaattctgatataccatcttgcttttcttgaggcgattctctattggagaatgggagatcaagcaaatcggctaaagcttcttcaaaatcatcaaatgttccgtatccaggatgttcgtaccttacaaacccatcagtatcaatcaatatgtgcttgggccagtatgaattcccaaatacttcccaagttttattattggtatcatatcccgtcacatctccatccaatccaaactcctttaatgccttttcgatattagcgatatttttggcaaattcatattcggctgaatgaatcccaaatacaaccaaacctttatcagcatatttctcttgaatcttttttattgtaggaatggttcttaagcaaaaaatgcatgtatatgtccaaaaatctaaaagcactaccttaccttttagttcctttatactatgcgtggcgttgtcgctccaattcttgatatctttgaattctggtgctgatacggcaggtataatgttcatttaatgactattttcatcatgtaacttatgtctgttttctgtagtattctatttatttgaaaatgtcaaatcagatgcgggagatgggatttgaacccacgaacccctaagggataaggccctcaaccttacgcctttggccaagctgggcgactcccgctttgacattttattgttggaaggataatttgaatattcccactaatatcataatggcatttgaatgatttttattatggagttcatttttttatagcatgcttgttccagtaagatgcttcacatgtggaaaactgatagctaatatctataatgaatatttaactcagttaaaacaaggagaagaaccaaataaaattatggattctttgaaaattacacgttattgttgcagaaggatgttcgtctcaagcgtagagaccatatatcaggtcattccctattatgaagctttgaggaaacgacgggcggagattcaatctgaaatggaatgataaacattgcctgaaatcacttctattgaagaaaggctagttttcaatagccgaggagataaaactatcgaaattgatgtacagtccgacaacaagtaccaagggagggcttgtgcaccatcaggcgccagcgtcgggatgtatgaggcacaaagctttattcaaaacgacccagaattaaccattagtaattttaacagtataaagaataaatttattgggattgacagcgcagacctcaaaaatctgcacaatgtgattaaaacagtggatccttctgataattattcaaatattgggggttctgtggcttacgccctttccatagcgagcgtagattcagctgcaaaggccatgaacattccattctataaagttttgaaccctaaattggataagattagtttcccgtaccctcttggaaatgtattggggggaggcgcacatgctggtccaggaacccctgacttgcaagaatttttaatttgtcctgtaaaatcactatcgatctccgaagcaatctctttgaattcacaaattcataaggaggtaaaaaaaagtatcgaaaaaatcgacagtaaatttacatatggaaagggagacgaaggaggatgggcccctgctattgtaaatgatcacgccattgagttagttgaaaatgcaattattcagtgcggatatgatccaaagaaagagatcagaatgggtatagactttgcaagctcctcaatgtgggatactaacaagaaggtatatgattaccagcgggagggaattttaagaacaacagagcagcaaatagagtacgttaacaaattgatccgtgactacaacctcatatatgctgaagatccattgcatgaagaggattttgagaatatgtcgattatcactaaaaataaccctacgtgccttgttacgggtgatgatttgctagtaacaaatacaaatagggccactctggctgctaaaaaaaaagcctgctctggagcaattttgaaggtaaatcaagcaggcactttatacgacgccatgttatttgcagaagaatgcaccaagaataacatcaaaatcattacttctcataggtcgggtgagtcagttgacagtcatatttctcatatttctatcgctacaaattcaataatgataaaaactggtatcgtaggcggcgaaagaatttccaaattaaatgaattattaagagtttcagagtatggtttaatagaaggaatggctaaatggagcaatatatcatgaatatgaatactgaggaaatggattctcttaataattctaataatgaaaacatagataaaactgttaacgatgatgcttccacaactgaggaagaagattcaaaaaatacaactagcaactcagaagaatctcctgaaaactatggggaatctgatgaaactgaacaaacaattattggcgatgaggaaccgaacagttcgtctgatatcgtagaacaatcagaatcattagaagatcctaataacctagagaaaatgatattgtcaactggaatcagggtaggaactccgatcaaaactaaatttatgacatcattcataactcgtgctaatcccgaaggcttgtatatccttgatattagtaaaactcttgcaagaattgacgttgccgccaaatttattggtagaacgaatattgcaaatgttgcggtaacatctgctagggagtacggaaaaacaccaatcgaaaaattttgtgaactaacaggcgctcgtggtatttttggaagatttatgccaggtacatttactaatccttcattacccaaatatttggagcccgaaatagttatagtcacagatccgcaggccgatgaacaggccgtattggaagcaacaagagctggggtccctgtaatcgcattatcaaatagtgacaatattacttctaaagttgatttggtaattccatcaaataacagaggcagaaaagcccttgctacggtttattggctgttgacaaaagaagtccttaaaaaacaaggaaagataaagtctgattctgagatgccattgacaatagatgatttcgaagcaaaactagttgaagaattgatttaattaaatattgacacgtgaacataactttagtggagttttttatcctaaagattatgggaaattgaatgcttcaattcaaagctttttttcgctcctgaattcctcttctgaagatagcaaattcctacaaatggtaaatgaatatattcaagataaaaagattctgagttttatagttcctcatggttcgtacgattactctggttatgtgtcatcattcacttattacctaatagacaagatagaatgtcagaatttcataatactatcttccgatcatcgtggcactagccctggtatttcggtgtgggatcaaggtagctggaatacccccttgggtccagcacaaatcaacgagacaatggcacgtgatctgataaataaaagtaatgatggctttttagagatagattcattttcttttgaaattgattacacaattgaaacacagttgccatttattcaagtattaaagaagaataattttagatttttacctatacttcaaagaaaacaggacaaaaagacttgtatacaactagcaaagttattagcaagtatagtacctcaaaatgaaaaagttatactattatctaccactaattttactcactatctaaattataaagaatgctatgccattgataaaaaactgatatcagcaatttcaaagatggatatcgattcattttatgatactttgaaaaactattttcaatacatctgcggatacggttgtgtaggtactgcaatagaattttctaaattattgggaaactttgacgtaattttattaaagcatcttacgagtggcgatattgatgacaaaaagtcttcggtcgtgggttattcatcgattctaatgctttagagggcttgaggttgaggaggagtactaatagtagtaggaatgggagtttgattgtattcaaatactaacacttttgaacgccaaatagaagcagtagctccaggaaaggtaattctttttggggagcactttgtggtttatggatatccatcgttaatcacatcaatagataaattctttaaggtaaaattatatatctcgccatctacggccgatgaaatcaaaattgaatcaaatctaggttttagagccactttacaaaactcggtgctttccttcccagtggaacagaataacacatatcatgaaattatcaagaagctgtacagcgttatccaatatctggtgactaatgtcagcattgatgttagatcaaagtatagtattttgattcgtttggactctgaaatcccgttaggcggaggacttggatcctcttcagctttttgtgttgcattaacagctgctctttaccatttcatagataagacgctaaataaggacaagatttgttatgaatctattcaagcggagaagatactcaatagaaatacttcgggagcagattgtagtatttgcacatttggggggttgggacaattcgacagattgaatggttttaggaggatcttagcagattttagtgattatcagttcttgataataaatagcggtattacacatgataccttttctatgatagagaaggtagccaaaattaaaaataattatcccaatgattttaacatcctatgtaaccagtatggagatatctataatcaagttttcagctaccttgagcataacgatattgaaaacattggtgaacttttaaataggaatcaccaattgttagtcagtctttctttgtctaatcccataatagataagataatcaatatttgtaattctgagggttcgttgggaacaaaaattaccggggctgggggtggtggttcagttttgtctttcctgcataaggatgatctttcagcagtcaagaatattctaaaaagattagatttattaaatttaagatatttctttgcaaagattgatccagaagggttgaggataggtcgcaataactaatacctcagcgcctttggccatagtaccaagatcccaaaaaattttaataaatcacacaattaataatgtcttgatatttcactagtctagtacgtcttcatggctagcaatttaataatcataaagttaggcggatcggtagttacattcaaagacaaacctttatctccaaactacgaggggatcgataaaatattaaaagtattaggtgaaatcaagaaaaattttaagattattattgttcatggtggaggttcttttggtcactattggtctgtaaaatatgatatgcataccaagccatacccatattcggatctaggtgtatctgtagtccatgaatccatgatcaaactaaatcacataattatcactaaatttatagagtccaaactaaaaccttattcggttcaaccatctgcattcgtatttaacagcgccgcggatcctgcgagaatacatgatatccttggcatgaccactgggaatgatctgatacctattacgtttggagatgtaatacatacctctgaaaataaattttcaattctttctggagatactataatgtctatgttatgcacacaattacatccagatttctccatttttaccacaaatgtagatggattatacaataatatggataaaggggaaatagtccaggaaattcgagtagacaagacagataatgacaatatttttctaaaaggtgaaatgcaaagggataaccctgactcttcttttgatgttacaggaggaatgaaacggaaaataactgaatccattcaaattgcaaaatcaggaacaccagcatatttgattaatggtttccatccagaaagaatattagatataattcacgatcgtgaatatattggtacatgtataagaaagggtcctgggagttaggacggaaatgaaatattcagatttctgggagggagttagatacggatagcgaagaccattcaatctccgaaaaacaaattgaaatgataaagaggagaaaaaaagaaggaatagacatccctctgaatcaaaaggttcagggcagagaaactacaactcttttggaggatgtatatttgatccacaatgcgttgcccgaaatcaatatagaagatataaaattgaatacagttttccttggaaggaacttttctgctcccattatcattgactcgatgactggcggtactgatgaagcactagttataaacaaaagattgggtcaaatagctgagaagtatggattagcaatgggccttggaagtcaaagggctggactaaaaagtgacaagctggtccagagttatgctgttgctcgcagcgttgccccaaatgcttttttgattgcaaatataggtggggcccaacttgcggaaggattatcaaaagatgatgtgaaaaaaatcataaaaatgattgatgctgacgcattagccattcatttgaacccactccaagaactgattcaacccgaaggggaaccaaattttaagggaatactacaaaaaataacctctctagtagaggaaatagagattcctgtcatagtaaaagaagtgggctctggaatttcgcctgaggtcgctctcaaactccaaagtgctggaattggagctattaacgtggcaggggcgggaggtacaagctgggccggaattgaaaaaataagagcggataatgcccacagtgatataaaatctaatttgggcacccttttttgggattggggtattcccactgctctgtgcatattattgacttcaagatcagtaaaaatccctgtgattgcttcgggtggactccgcaatggcctagaaatagccaagtgtttgatgcttggagctaaaatgtctgcaatggcctttcctttcttaagaaaggctgcagaatccgagtatgagttagacaagtttacccagttgattttagcgcagctcagaggtacgatgtttttgttaggttcatctgatattgattccttggtgaatacaagatatatattgaaagataaattagcaagtatgttgaatagttatgagttcagaagacataaaaactgaaatcaatcttgttgcttctaagataaatcaatttattctcaataatatttccggcgagccttttggcttgtatacggcttctttgcactatataaatagtgggggtaagaggctgagaccctttatgactataaaatccagcgaacttcttaatgggaatttacaatcttcgcttccggccgctgcttctgtagaattaattcataattttacattggttcacgacgacataatggataatgataacgttaggcataatgtaactacggtacatcggcaatttggaattcctttggcaattctagctggagatgtcctcttttcaaaagcattccaagtgatatctattcatggaaagaaggttgggcttgatcaatccgttctgttgaggatggtggacttgttatccacttcctgtattgatgtctgcgagggacaagccttggatatacaaatggctcagaacgacgagttttcatcaacaggatcatatattaaaatgattgaaaaaaaaacggccgccctgtttagagtttcctgcgaattgggcactctttcatcacctgattttgccgaaaatgatttaggaaatatgtctagatacggagaaaaaatcggcattgcattccaactaattgatgatttgataggaattcatggagattcaaaactaactggcaaatttgtaggaaatgatatacgagaaggtaaaaaaactctgcctattttattagcttttcagaatctaaattctacagataaggatttattaagacaactgtttggcaaaaagaatgcgaaagattctgagattgcagaaatggtgaaaaaaattgctgaaattagagtcgatatggaagtccgtgatattgcaaacagttacgctgaggaggcatttaagacattaaaaagttatgatcggtctcctgccttaatttcattagaaaattctgcaaaatacattgtagaacggagtttgtaattttaaatgattgccgatcagaaatttgtcaatactgttaagttgatagcattgaagaatgctctggagtttaacaacacaataaaaattgacgttgttatttcaaagactttttcaatttctaaggacatgggagcgaatattgatataaaagaattgattccagaaattaaagaaattactagtgaattaagagatctttcagttcatgaaaaaaagacactttatgactctattatcttggaaaataatcattatttaaaacatgtcaaaagtgaaatgggggcaaccgataatatccaaaaggattcagaaaataaaaaggccaaaacctcaactggaaaggatatcgaatttgaactcccaaatctagaaggggcaattcaaggtaaagtagtaacaagatttcctcccgaacccaatggctatcctcatatcggtcatgctaaagctgcggtaattgacgaagaatatgctaggaaatatgacgggaagttgatcttgcgatacgatgatactaatcctcaaaaagaaaaaattgaatattacagtgctataaaagatggtcttgactggcttcaagtaagaccagatgagatcaagaatacttctgatgatattgttaaaatttatgattatgggaaggagttaatccggagaaattttgcttacgtttgttcttgttcaccagaagtcataaagagtaaccggctaaatgcgattgcgtgtgaatgtactaataaatcgattgaaaataactcgtctgaatttgaaagtatgatcgcaggaaattatgacaagaatcaagcaatcctgaggtacaggggtaatatggccagtcttaacacggcaatgcgggatccaaccctttttagggtcataaaaggtggtcaacaccctaaggttggatcaaaatattcattatggcctacttatgattttgctgcacctatagaggatagcctcgacggcgtcactcatgcctttaggacaaaagaatacgaattacgaaatgaactgtatttttccatcttagataatttgtctttagcaaaaccaaaactgattgaattctctagattggaatttgaaggaattccagtttctaagaggaaaattacgcccttgattgaaaagggaataataaagaattgggatgatcccagattgcctaccctcttgggattgagaagacgtggaatccttcctgaagctataaggaaatttgttctttccctcagtattacactatcagaaacaaaaccctcaatggaaatattggaatcatttaataggaaattgctggactccaaagcacaaagactcttttttgtcaagtgtccagtcagagtgaaaatagacacgcttgatatcgatacagttgagataagaaatcatcctactcttgacatggggaagaggaaggtgcgggtaggaaatataatttatatatctaacgatgatgcaattaaactaaaaatcggagatacattaagattaatggatttatgcaatatagaaattttgtcaattgaaaaaaatctcagcaaggatgataacggcggaaatgagcctaatattgttattaatgcaaaaaataagggaaatgtaatttctcataatatgccaaaggttcagtgggtatcaaagtccgactctcaaaattataggattttaaggccattacctctttacgaaggagacaaatacaatgaaaataatttaatagtggattgtggattagctgaatcctatatatcaaaacttgacattggaactgtgattcaatttgttagatatggattctgtaagattgatgacaactctactgcaatatttacacataggtgatattaaaaaatgaaaatagcaaggattagattgaaaaattcagtagaatcatatggaattgtctctgaagacgggaagaaaataattactaaggaacaaatacaggaaaagactggagttcctatcccacctcgaatcaaggaattcttgtttggtggttggctggcagaagtaaattctgttggagctaaacttacttacgatttaccaataaatgaagttgatttgttggctccacttcccaatccgcctaaaattatttgtttagcttttaattactatgatcatgctcgggatgcaggattaacaccttctgaagaacctgtaatattcctaaaaccaagaacggcgttaaattcaccttatggaaatgtcatctccccctcttatgtaaagaggctagattatgaagccgaaatagccgtcattatcggaagacaagtcaaaaaaatttctgaaaaagattcattagatgccgtatttggttacatgatattccatgatgtttctgcgcgagatatccagtttagagataagcagttcacacgaggtaaaagtattgatacatttgctccatgcggcccttggataacgactaaggatgagattcaagatcctcaaaaactacgcattacaaccaaagtaaatggcgaattaagacaaaattcgtcaagtagcaacatggtaattccgattagaaaaataatatcttctttgagtgatctcatcacaatcgaaccaggagatatcatatctactggtactcctgcgggagtagctatgtcaatgaaagagcccaggtatttgaaacatgatgatatagtagagatttctgttgagggattgggaacgatccgaaatcggatcctgtttagttaattagaatatattaaaaatctaacccgaaatatgatatttgtcgtaatcctgtgattatttctatcctatagttttagattctaaggtttttcgtacaacgccttttttaactcattctctaatagtaaacaatattgtttgtaagtttctaccaattgttccctgatattagctaactgcattgactggttgagagtctgtacgcaactctcaagtgatctctcagaggcgaatagttccatatttaatttaaaattctttaccagttctctctgttcatcactgatttcttcaattgatttaataattgactcgatattttcatttaatttcctcgtctccctgccgtcatccacattgaggtgttttcgcaaaaatatcaagctaaacactggttgtgcgcatatttaattatttatttgttaagaagtttaatgatgcaatttaccataaatctatgacatgtttaattcactagtctgcatgtgacattgtaactaatatcggcacagaaattcaattggtattatgtatattctcgtctcttaatcggcattgctgtagagtcgcaaggtataagtatgtaaaacattgcatcctaaactcaacaggagggtttccatatgtttacaacatataacaaagaaatatgtataataccctttggcgattaaataatttagttattgaaatttgatatagccattgtaggaggaggaccagcgggattatctgctgcatattctgcatccaaacagggtgcaaaggtaatcctttttgaaaaggatccatcgtttggtcataatattaggaccagcggcgttacctggatcaaagaaattgaaaaattcgatattacggaggaatattataatccaatcagaaattattccttcgtctctccgactaatcaaattaagatttctgggacacttaattctgcatgtgtccttgatgtcaggaagacctatcaatatttagcatctagcgcagcttctgaaggtagcactttgatggttaaaagccaagtcattgatgttaaaaaaaattcacaaggacattcaagcattttgaaagtaaattctcctaatggaccattggatgttgaggcaactttagtaatagatgcatctggctttacaagttttgtatccaggaaattaggatatgttggatcgtgggggcgatatggcataggtgcggaatatgagtgttattgtgatgatgtggacaaagaaactttgtgccttatggttgggcagatttattctgacgccggctatgcatgggtttttcctctgtccaaaaatcgcattagaatcggagtgggtatcgggaagccaaattcagacaccgacccattattcaaattaaaccaaatcctcaaaagtcgtttgcctccactgaatacatttgggaaaattcaacctttggagcttcattacggtatgattccaaatgaaggattgcgtacaaatagcgtctttgatggcttgatcatggttggagatgctgtgggtcaggcaaatcccctggttctagaagggataagatacgccatagagtttggacgtttggctgggatggtaggagctgaatcattgcaatacaattcatccagagattctctaaggccctacgaagttgcaaacaaggatctccttgaaaaaaaaataaagtccgctttaaaggttcagtcaagatggcttggtttatctgattcagaatgggacaaagaaattgaaataataaaagaattatcaatagatgaatttttagatttcataaagtcagattttacttatactaaaatggctaaattagcccttaatcatcccaaaatgatagttaagcaattgtttaatctcgtattaaacaaatagtttttttatgagcatcaaataagaagatataaatatcttatattgtcagccacttttaatttggcaggagaaaccgctacacaatttcttccaatattatatttatttggatttgggattttagttggggtacccgcaataatcatgtcgaggttgtttatgacaagaagaaggtataatccagtaaaattccttccaatggaatgtggtcaagtaccttcaggcgaaggacgatctcattttatgatgcagtattattcttatatcctaatgtttgtcgtctttgatgtaatgtcaatttttctgtatgcttggggtgttacctttttttccatccctaaagaagcaactttgcctatgataggatttttgggtattatgtttgctgcaatggggtatgcattattcttggcagggagaaaaggaatctggtaatcatgttgaacccaatagatattaataacttgaattgtaattatctatcaagtgtagaggtatgataaaggatctcgttaaccctacccattttaatgttttagtgtcaaagctaggcgatgttttggtcaaagctttcgatgaacccttaggctacgcaattaactggggccgtgtttggtcactatggcccgttcacttggaaactgcttgttgtagtgtagaatttggtgctgtttcaagtccgcgctatgacgctgaacggtttggaatattggaagcttttggttcattaagacagtgcgatttgatagtagtacaaggaacagtaaccaggaaaatggcacctaggctcaggatggtttatgatcaaatgcctgagccaaaatatgttattgctatgggagcctgtgcaataacggggggactgtatctagattcatacaatgttttgcctgggatagatagcattgtgcccgtagatgtttatgtcccaggctgtcctcctagacctgaaactttaattcaaggtacaatgttgttgcaagaaaaaattaaaaggtcgaaaataaaataatggaaaaagacaatactcaaaataatcaaacgaacttgatggaagtaaaagaagaaaagagtaatttactatctaatagactcattaattctattactactaattttggagatcaagttaaactcgtatataaaaaggaaaaccgatccaagataatggtgagccctgaaaatattgtagaaacggctctatatttaagaaataatcatggatttgatcatgctgaatcagcttcagggactgactatcccgctgataatcaaattgaaattaattatcatttgggttcttatagtaatacagattactatccttacattgtagtgctatcaacgagagtcgatcgaaccgatcccaagtcgaatagcttgataaatatatttccaagtgtagaataccatgaacgggaaacatatgaaatgctgggagtattttttttgggacatccacgtaatgaacgctttatattgcctgaagattgggcggatatgccacctctcagaaaggatttccgcataaagggaagatgataatgaaatgagcagtctggaagaaaaaatcgatgaggcaaagaaattatcacttcaaataacaaaggaaactgaagatgataagttaatgactttaagtgttggtccacagcatccagggtccggccattttagatttaccattaaagtagatggagactatattgtatttgtagatcctgaccccggctatgttcatagggggcatgaaaaaatgtgcgaatatagaaatcactttcaaaacataccccatttagagcgccccgtgattcatgattcttgtaacattacatattcatacagtttggctgtggaggatcttgtgggcatcacagttcctagaaggggtcaatttattagagcacttgcatcggagcttagtagactttcttacacattgtattggctagcaatatatggaatattcttgggacattcaacaatgtttatgtggcctgcaggagatagagaattacttatcgatttattagagcgattgagtggggcaagagtaactaatgccttcaatattccaggtggagtcagaaatgatatcccatacaattttaaagaaaaatgtttggcccaagtcaattattttgaaacacggctaaaagaatatgatgatattttttataacaatcctttgctaagacaaagaactgagggtgttggaatattaaccaaagaagatgcgattaaactaggggtaacaggatctgttctacgggcatcgggagtaccatttgatgtcaggaaagtggagccatatgacgtttatgatgaaatcgattttaatgttcaatacatgaaaacatgcgattcttttgcaagagcatatgttcctgtactggatatgcgtgagtcatgtcacataatcagacaattattagataagatgccagagtcaggagacgtaagagaaaaattgcaatttaatattaaaagctcccctggagaaacatacaagagggtggaatcaggacgaggtgcgttgggatatcatgtagtgagtgatgggagtccaaggccatatagggtaaaggcatcggtaggttcatttaggaatttgcttgctttacctttcttgttaactggatcgaaattaggtgatatgcctgcagtatattggtctctaaattattggccggtggaggctgacagatagtgggttcgctgaaccccaattttagattcgggaatttcgcagctagtattgtctggctcttatttgtagtgctagcattagttaccgtactcattcttccgataatctttgttacgttattttatgttccattgcccgtagttgaaggagaagttttgaccccgtatcttttcttttcaatgataattgatccgtctaggacactacctatccttcaatttttcatgcataccgacctctttagagcagcagtttttcctgggtttgtatttgcggctctgatagcagcagttacaatatttgtcgaacgtaaattgctagctaaaatgcaattgcgtgtaggaccactttacgctggtaaagttgaaggtattttccaattattagcggatgggctaaaacttcttacaaaggagattatagtaccttcaggagctgataagcccatattctggttggccccaataatgtttgtggctactgccgcggcggtagtggcgttaattccggtagccccaggttgggtagttgctgatgttgacgtagggttaatagctgcctttgcaatacttgggttcttcccattaatcgcgttgttattttcatgggcaagtaacagcaaatatccattcataggcggattaagggccctccaccagatgatcgcctttgagataccgtttttcttatccgccttaccggttgttcttttatcatcatctcttaatctcacggagattgcccggtcacaatatatgatctggaatatttttttacttccgattaacgcttttgtatttttcatatcttctttggctgaattagaaaggatcccattcgatctgcccgaagccgaaagtgaaatagttgcaggctggttaactgagactactggaatgatttatggattaatacagctaggtagctatttgaaactatacgctcttgcaggattgtttgtaaccctctttttaggtggatggtatggaccacaaatatttcctcccgaattaattcctggggctcatgaatctaatttgccgttgctacaaatgttagccttagatggggtatacaatgcgattacggtaaacggcgtattctggtttttggtgaaaacaattgtggtcatctttttgatgttgataattagaggtatcaatccgagaattagaattgatattttacttcatacaggatggtacaagctaatagttttaacattcataaatctgttcgtcgtattgatgttgatttacggtggaattattggaccggagggagtgatttcgataagatgaacactgcaacaggattcataaaagctctagagtctggaactaagcacctagttttaaaaagatttacattccgttatccagaggaaaagctgaaatttgtgggcgatggataccaatttgaccccaaaaaaggtgtcggaattgctgggactagaggtagacatattttatttcatgacaaatgtaccggatgtcagctttgtgctatagcttgtgagggaatagcagaggcaatcactatggtgaaagttgatgagcagtggaagcaaaataaaaaatctataatgcctcaaatagattatggaaagtgtgttttttgtggcttgtgcgtcgatgcttgtcccttttatgccttgtacatgacaaatgactatgagttgtcttctttcaccaaatctgctttaatatacacaccagcccagttggctgtaaaaccaaaatatgacggtgaggtcgaaataaaaataggctcacgaggtgcatatcatggtagatagtgtttttgtaggtttatctgttatcaccattggatcagctatattgtctcttgagagccgggaattattgtacgggggaatagctttggcagtttctatgcttgggatagcaggctactttattattttggatgctccttttgttgcaatgtttcaaatagctgtatacgtaggtgctgttgcagttcttattatattcacagtgatgctagtacgggctccgaatacagttacaaaaaaagaaacgcggaaaagaaagattgcaggtattttgctaggattagcatttcttgttttagcaggatccatattaggtaattctgctgcaacccaactgaaatttaatgacacggttccaatatttgatgtacaggcaatagggaaagaattattaacatactattcaccggtattgttagtattggcattaacactggctgcagcggtaataggtgccctggccttggcacgcagagaggatattgaggaaagaaatgaaccaaccaactgattttttatatatagctataatcctcatttccattggaatttatggactagttgtaaaaagaaatgcactacgattaatattctcaatcgagttaattgcaaatgctgtaaatcttgtactcattgccttttcaaggatgctacctagtcctcaaggccaagtgtttgtgcttttctcgatagcaatttctgctgcggaggttgctgtaggcttaggaatcataattatagcctataggttctacaaagatatagatattactgaatataagaacctaaagaattaattttattcaaaaagtattttttttaaaaattcaaccgtataatatataaaaggagttaatgtcgttgtggtaggggtattcggagcaagagatgtagatggtggattcttcctattatcttatggtggcaacatttatgcccttgatattatctccggtagtgtattttttgggaaaacgaaagggaataaacattacaacgtggttgacttttggaattttagctatctccactgcgctagtgattattccatctataggcctaggttctggaggatcatatcaagaagtctttgattggagtcaattgggtcatttcgggttaaaattagatggtttgagcattccttttgctattacgatttatctgctatcaactattgtggttatttattcaaaaccctatatggtaagaaaaattcttcttcagtatgaacaggttaagagtttctctaatttgcaaatgaatgatgctgaaagtgagttgtattctaataaggacggaaaatctttatcctctttaattttatcgaccgatcaaaagtcctacttaaatagtcaactaggcctttattattctctttatcttgttttcgcgatgggtatgcttggtacagttttggcaaccaatttgttcgaattttatgtattttttgaactgatgttggttccatcattctttttaattgccttttttggatacggaaacaagaaaagaacatcattaatgttctttttctgggctcacgtcggtgcagttatcctgctgttgggtttaatggcgatgggttttctgactggtgggtttgattatgatatagttagggcaaatgcgtcccaaattccacaagcatggattactgtaattgtggcagcgctgattattggatttggtgttaaactagctgctttccttgtccacgtttggttaccagatacttatacagatgctcccactcctatttctgtactgatatcctcagcaatgacgggaataggtgcgtatggtctgataagaatttggattgaactgttgtcgggccctggaaactataccgattatagtatttacataagcatctggggggttgcaacaatgatatatggaggtgccatggctttaatgcaaaaagatatcaaaagagttttggcctactctagcataagttcgatggggtatctgctttttggtataggatcagaaagtgtcctaggtattagtggtgcaatctttatgtatgtcacccatgctttaggtaaaggactattgtttatgatggcaggttccattatcttacaaacaggaacaagaagcatgaataaattaggtggattgggtgggaaaatgccatatactgctgtattcgcaatgattggtggattaacaatcattggtgtaccaataacaagcggttttatgtctgaatgggtcctctttaatggcgcgttacaaaatgctgtagttagcgagagtgctcttaaggctgtcttatttgcattggctataacgactactatactgacatctgcttatatattgtggatgtacaaaagaatcttctatgggattaccccagaaacattaaaaaatgtacgtgattcgagtaagtatgttttagtaaccatggggattttagcttcattaacattgatactgggattatatcctgatttattttataaaccgattataggatatgttgaaaatctttataataattcagacgagctgatacccgtaaagatcacgcctggaacagcacaattagatgaaaaaccaattaacaatacaaaggttagtaatgttgcttttccaggtggaactgaattccagaggacatatctgatatctgaaaattatgtggatcatcgcattactttataggtgaataaatgtggttgaagttttaggttttgaaggaataggggtaaatgcatggttaatttggatgactccatttattggagctgcctttattccaattttaagaaaaaaaagtgaaaaattcaaaagttatgttgctgttgcattttcaattattagtgccttattggctttgagtatcctgcctctagggttgacaaatggagagatacatagtcaaatcccatggttttctgccttagatatagacgcaggtgttttggctgatccacttgccataatcatgagtaatttagtagcttggatttcggtagctatctttgtgtattctatttcctacatgcatggacaaagatcgctgataaggtattggttctttatgctgttcttcataggatcaatgcaacttattgtattatccgacaatttattgatggtatttttcggttgggaaggagtgggacttgcgtcttatgccctgataggattctggtacaccgatagaaagaaagattatgttggcaaagaagggcatacagcttggggcatacctcagtggacatcgcctacacacgctgggataaaggcattcttacttaacagggccggggatgtcatgatgctgtctggcatgtttatgatctttatgtattctggtacctttggctttagggaattattggccgaccaaacctgggctcatgtgatgatgcaacaaaatctattggtacccgcggccgttttaatatttggaggggctataggtaaatcagctcagtttccgctgaatgaatggttattggaggcaatgacaggacctacatccgtttcagctcttatccatgccgcaacaatggtaaaagcaggagtgttccttgttgctagaataggtcctctatttttcgccttgtctgtatttaatatgaatcagttttttgaaattgttacatgggttggagcgataactgctctgttgttagccactcaagcaatagttaatcctgaaataaaaaaagtcttggcttattccacaggttcgcagattggctatatgatgatggctttgggaattgcaggtctttctacaaactttgttgacggatatactgcagggttttttcacctgattagccatgcactgtttaaagcttcgttatttatggccgccggtgcgatactacatactgtacattctcgatttatgaacgatatgggtgggctaaaaaagaatatgcgaaaaacttacatattcttcctgctagcaagcctgtcgctagcgagtgccccattgataacacttggattctggagtaaagatgcaatctttgcttctatccttgaatctaactatgagttctcttcttatgtctttttgattgctgtcaccgtagccattatgaccgcgttctatacattcaggatggtgggcctagtattttttggaaaaccgagccaaaatgtagtcaatattgaaaataaaggacatcgtatacgtgaagtcgataaaatcatgtggcttccattcgccgcattggcaatagcatctattgcctttggtgttgtgggctttgcttttgagggtcaactgcatcatatatttgcaacatatcttgacacttattttggaatcactgagaacggagtggtaccattaggaggatctgaagccatacaaagctcacccgaattaaccggatccgatgcaactactaccggagggtctgaacaggatgcattggaactcaatccatttgcggttgtttcatcagtagctgcgtttggaataggaggatttcttggctatttgttttacatcaagagaattgcggacccaaagaagatcagcgacaacgttgtttccaaggcgttatggaagttcctatacaaccgatggtatcttaattcacttctttattggataggcgttgtattaccattggcagcttacagacgaatttacaagtattttgaaaacatcttaatgtatggaattaatccttcagtacaacaatcaatggtattgatgtcaagagtcgcaaaagcagtacaaacaggtaacgtacagacttatctttatgtattttcagctggtataattctaattaccatgctattattgagttaaggagagaatgagaaactatgattgatatattttcgacccctgctttagtaaccatcatcctagggagcgtagctttgttaattccaataatagatgccttgaataaggagcgaggatctaagaataaagtttatagcgccatagcctttggggccctaactttagcccttattgttgtgatatatcggatattttctggagaaaatcttcccgcattatcattagcaaatactggagtcataggagacgatatttttggtgcattcttctctatagcatttcttatagtatccattatggtaaccgtttcttcatggagttacatgaagaaaaaaagcaatcatgctgcatactattctttgatattattatcaagcattggaatgatcctcataggttattcaactgatttcgtaatgctgctagttgcttgggaactaatgtctatccctacatatgcgttagctgcttttaataaaaaagatcccatatcaaacgaggcttcaatcaaatactttttgtttggagctctatcgtcggcaatcatcgttttggcaatgggaattgtgtatggattaactggtactacaaatatttacgattcaattgtggcaatgtcgcatttgaatccagatttgatcccatttggcttgctggcagtggggctttttatcgctggctttggattcaaaatgggtctggttccattccacatgtggttgcctgatacctactccggagctccaactacgattgctgcgctgcttgcagctggaacgaaaaaagccggatttgcagctgccattagggtgatagttattggtatgatcgcccttaacgtgcactggacatttactcttgcaataatagccatttttactatgacactagggaatttaggagcactgacacagaaaagtattccgagaatccttgcttattcaagcattgcgcaggctgggtatatcttgatcggacttgcagttgctccatattctgactatgggttagatgcctcgttgttgcaaatattgaatcatgcagtaatgaaatctgctgcctttattgctgttgcgggtgtaattataaccatagccggctatacactcgaaaagtataagggattgggatttagaatgcctatcacagcgtttgtgttcgccatctcgttacttgcacttgctggagtccctcccctaagcggtttttggggtaagtatttgatatttggagctgctatagatagtggtcaagtaatatggtggggaccttatcttgcaatagccggtattctaaacagtgcattatctttgggttattacgcttggattataaggaaaatgtacatggaagagggcgaaaatagggtaagacagaaggaaccaaaatcgatagttgctgtattgctatttgcattgggttttatgataatatttggtatttggtacggaccattgctagacctagcgtcaatggctgtgcccaatgacttgattcatttgataagtgcgaaatagcgtatctgtttttcagtccctttccttatccatcctaatctttcctctgctgtagttcctcgctgtgttcctcaatcatatcttatttctagatccagttctagatcctattatgttaccttctttgaaactgttgatttaggtaatacttcttggataactcggataatcaaacgcttaatctaaaaaatgttcaaaaatgatcaatggactattactactaaattcttgttactataagtagaaaaattactttagaatctgcagtccaattttctttttttctcagctaggctggaaaaaatttatccatcatctcatcctgagcattcactatttttgcgagtttttggatatcttcaaagaaaatttgttttaatttgttattgtatatagtagctgctggatgataagttataaaatatttcaatggtgggcgattaactatttgcccacgatatggtgtcatatattttagtccaactaatgactttaaagccgttgcgcccaaaatacaaatgattttaggtgaaataatatcgatctcttttttgagatattcactggtgcatattctaatttcttcgtcagttggaaccctattatcaggtggcctgcatttgaccacatttgtaatgtaaatctcttttctttctattcgtgcgtcgattagcgcttgatccaatattttaccagcgcttcccacaaagggactaccagtctcatcttcgttttttcctggggcctcgcctatcaatattatttttctatttatacccccactacctggtacagcattcttcctggttattgatagtccgcacaggacacattgaataacttctttctttattgattctaatgattcattttgaggactcaagttgggtacaaaactaaactaaggaagaattacttgaaaatcaatactttgattcagttaccgattctgatgataatcctccagtggcattttgtgcatcttctgcaggggacgaggaattaattatcaaatttgcaggactcgatgtggagtttgtaattgcagaaactaccgattctgatgataatcctccagtggcattttgtgcatcttctgcaggggacgaggaattaattatcaaatttgcaggactcgatgttgagtttgtaattgcagaaactaccgattctgatgataatcctccagtggcattacttatgctggtattattagattgagcaaacacggtcggaagtccaatcattaatattggcaaaacaagaataaccaaattagaacttttcatatcactttctatacttttgtaatataaaataatttcgttagattcttatacagacctaacaaggtccattattactataatcatcagggcgaaatcaattatcttggatttgacaaaaataatttgatagtattgataatttcaactctagacctacaccagtaggttggttctttaactataataaacatgataatgacagaaacttaatgcctttattgattggtatctaaaatgggattcactagtaatgtaaatcgatgagtatagtatcgaatccatttagttatattgatgagaacactctctcagcaacatcccagaaaaagtaaatgtttgagagaatcaacaactttgattaaactgagttctcacatccattttttttcaaacatcagggttgctggtctgatttcatatactttcttgtattctatttgttccgtatacttcttattcatgctcttaaaaaaagtcggttattttattaccgatgcataattaatcaatcttgtcttatcaatatctgtcttttggcctataaaacttgaagtatcttcttatccaatacaatttcttgtatcaattttgtattttaaatagaactgccctgtttctaatcaagtttaatattatccaaattcaatttaacaagataaaacgtacatatttggatatcaatgctgtctggggagatcaaaaaacaactataaagggcaatttccgtaagaaaaatagtatagacatctatttcctatctagaaatgcttcaatatcaataattcttgtcatgatttattatgtcatatttttagtctttgacgaccaataatatcaatattttgtatcatagtatttaaaacttgtatattcctattccttatttcgaaaacttaatgattatttcattagaaacgataaaatgaaggattagcattataataagaactaaaatgtggtggaaaaaaacaaaatggctcaaaaattaattaattcgtattcatcagtattatgtcctttatgtaataagcattctaatataattaccgatcagaattctggtgaattgatttgtactacttgtgggagtgttataattgataatgctgaggctgctaggtctgaatggacatcttcaaatattcaggaattagatttcagggatagaaccggtgcgccaacttctctggccaagtacgatcgtggactttctacagttataggcaagatagataaggatgcatctggtcgtcaaattgacctggcaatgaaaagtagaataggtaggtggagaacttgggacgccagatcacaaacaaatgattcttcaaagagaaatcttcaatctgcgtttattcagttatacacgatgaaagatgtactgggcttgcccgaaccagcaattgaaaagatcgcatatctgtacaggaaaatacaggaccggaaattgataaagggaagaacaataaaaggggctttggctgttgcttcttatattgcatgtagagaattaggaataccaagaacgttaaaggaaattgcaaaaattactaatctaaaagaaaaggaaatagcgagaatatacagaaaggtaatgtttgaactagacctcaaagtccctcaagtcgatgcattaaaagaaataataaagataggaaatatttgcggaatttcagaaagatcaaaaagacgtgctataaaaatgatgatgactgttacgaaaacagagatttctgctgggaaaaatccaatgggattggctggcgctgttctttacctgtcatgtaaggaatatgatgaggaaattacccaaaacaagattgcagaggttgcgggtgtaactgaagtcactttaaggcatgatttagatataatattgaatttgactaaaaccctgtcaagtaattaaaacgaatatctaaaccacgtatcatctttttttgcaaatatagaaatattgtagtaagtactacgaaaattaatattcctaccaattgtatcaagttaagtaacataatttttttattaagatagtacaaattatttttttgaataagcctaccaatttaccatagataattatcttacttgtttaagcaaaatgataattagaaactgtacaatttctaagaaaagaagttgcatgtaatgatttactattgctttgattttgtaaccaaaatctcaaattcaaatcaatattctttagcggtgttatttattctcaaaagataggggagctattatcagccaattccgtgtttggcctttctcccctaccacaataatgaaccggtgaacggaatagaaacccgactcatccttttgtatattaacatgttcaacattttatttaagctatatgtattttttttcaactatggtatgctacacgttcctatggagatatgttctagatcgaaatccacttcttatcaacctctccctgattttgattaagatatagttactactgaagataattgttttccaatagattgatcattattcgaactttgttgagattaattatcagagcgatagattgagaaataaaaatgcacattattcaaacactacttttgaataataaatctgagcatggattttgactctttgaatagtaagcatcctcaaaaaaatattggatgattttattcaatattataacaataaccaaggcacgagaaacaatgtacccaaagacaagttgattttgaattaatatcactttcgttatgtaacaaagacgttctgcgtttgcactgctcgagcataaaactccaagctgagtatgatgatctttaaacgaatctattcttaatttgccaataaattaagacaccttgtatctgtctttaaaggccctattttcaggtagtccattgaccaattctttcgcacttaggacattgtcttctattgataaattgctctacggtttcgttgatgtctggctcaataataatttgttctccacaataacatttcatgatttcaagcatatacatagccaaacttcctatgtattatagtttatttcaaatatcgctatagacaacaatggcaggggttattctaagactaggaaaatgatccaactgcacgaccctgatattaagagggcatcctattttgaagaagatacttttacaatcacaatttgacaaatcatgaaaactctgatgctattcttgtaaaaaattttgccatttaagacttgacaggtgttttgcatgctctttgtttaaccgtgttaaatcaattatcgaaactaaacagcttattatattttgttgtatatataaatatgaacagtagattgtcaaacgaaaataatgaaaatctagaggaatcgcaagagaaccaaaaaaaaattggttccgctgagaaagacccacaaacaactggcccatctgaaaaccttagagaagaagcactcgaagagaccgatacagaaaacacggataaggagccagcttaatctttttttagtttacgtcaccacataattgatgcgcctaatctataattggtaatgatatatgaaatagtaaagaattgataccaaaataaactaaattcaattgatgagcgattcttatttatattgataatagtgtttgactataccttttacttacctgcctctactttcttgattttacatatacagaaaataattattgtacgttggttttattcctgaaattaacagttgagctagattctataaattgtaaaatgttcattataaaatctgtaggcttttttaacaaaataacatctgttttattaatttctagcttaaagcaaaaattttggatacagtatatttacactgaagatgatatgtaagatcgtgatatgatatcaagtatcatctataaagaccacaccaaaatagttagtgttaagcacaacagatttaaataaaccgccgatcttccttttaaggataagaaatttttaacttagacttgtacaagattaaggaggctcaaaacctactaacaaaatatgacatcaggagaacagatttgataaaatctgcaactttttccaaattaaatggtaacaacttatatctgaaacttgaatgccttcagaaaactgggtcttttaaagttagaggtgcgatggtaaaaattcataatatgtcagatgaattaaaaaagaatggagtgattgcagcgtcggctggaaatcatgctcaagcagtagcttttgcatcaaaattttataatatttcttgcactattattatgcccaaaaatgcatctcctagtaaaattgttgccacgaagtcatacggggccaaagtgattttggaaggaaacaactacgatgagtctgctagttctgtcaaggattatgcagaaaaggaaaataaaactattattcctgcttttgaagatccagacataatttctggacaaggaacaatcggcttggaaattatggaagacttagaagaagtagatgaggtttatgtcccaataggaggcggcggtttgattgcgggaatatcgattgcaataaaatcaataaatccgaaagtcaaaattattggtgttgaatcaactgcttttccgactatgaaaaaatcaatttctacaaataagataacaaaagcaaaagaaggttacactatagctgatggtatatctattaaatctcctggtaaacttacttatgaaatcgtaaaaaaacatgttgatgatattgtattgatagatgatagtgcaattgtaaagacgatgtttttattgatggaacgatcaaaaatcgtatcagaacctgctggtgcagctgctctcgcttaccttatttcgaagaagaaaagcagtgaacaaggtaagaatttggtctctatcatttctggtggaaatgtagacatgtatcttttgggacaaattgttgcaaaaggcttgatgcaaacaggtagattattgaaaatatttgtagatcttaatgacaaacctggagccctgaaaaaaattgttgatgaaatttcaaaagctagtgtgaatatagtggaagtagaacatgatcgacttagttcaaatattcctgctggtactgcaggggtatacttgagtttggagttagagagcaagaaccaagccaatatattattagatttatttagaaaagaaaaaataaattttgaaatagtacaataggactaaaagtcctacatttattatatgtactcgtaaaaaatatgatttttggctactaaattagtaccgttccaccatctataacgattgtattcccagttgcataggagaaattatcgtctgctagggtcgcagcaacctttgcgacttctttaggtttaccccatcttttcataggtgattccaaagcggcctttattattatttgttcagtcattgaatctaacgtagcaggtgtagcaatattgcctaaagccagggtatatgctcttacgccaaagctactgtactccttggcgatacattttgtcaatgttatgtttccagattttgcgatggaatatgggaaacctcccacacgtccagaaatagccggagtagaggaaatattaattataacaccgccgccggcttttctatctcctgttatgttactattttggctttcaataggtgaattttttatcattattggaaggacagctcgacaaagtcttattgacccaaacaagtcgacgctaattatcttttcaagctcgtcatttgagccctcatgtattttcttgttccatattgtatcgtcatatggaaagccagaattatttacaaggatgtcaaccttatgatatatgttcaaaacgattttgataaactctgttacgcttgatccattggtgacgtcgacttcgagtgcaagtgctgtacctcctatctttgcggcagcagtcttggaatgagccagttttcgagaacatactatgactatagcgcctctctctgaaaattcctttgctatctcaaatccaatacctttacttgaaccagtaactatggctactttgtctaaaagagacattttactaatatgatcatattatcttatatttgataccttaccaattactccaatagctgatacaacaagtctctgataaatgataataaagttttgtcaaaaaaaaaaaccctgaatatagaaaattatgctaaattaaaaagtctctgcagtgaaatctttagcaatggaattggccaacctttgatgtggttacggtcttaaatccaacaaactaatatttaaaaaaagcatccaaacagctaatcctttgaagtagggctagtatttgaattgttaaatatgtcctctttagtaaaaatccattgtttacgcttaaaaaaaatcaatagcaatatcgaaattaatgccattgtaattaggactattaacaacccttgagggatatcacttaattttgtcaagtccaatccgttcattccgtatattcctgctataagggttaagggtagaagtattacgctaaaaacggttaggatccgcattgtatcattaagttgtaacgagatatttgccatgtatagatctcgtgttgaattaatagtatctccatatgattctaccaagtcaatcagctgtcctatgtcatcatatgcaatttgtaaatatctaatttcattgtcttggttctgcgtatgagttagaaagtttatagcgtctcttgtataccaaaaatgccttcttattactatagtttgttttgccaccacatccaaataattgagcatattttttgaaggctttttgtataatgatttttgttcaaaatctgtgagtgtaagctcaattgcagttaatatctgttcatatcttgatattatttcgtctataattgtataataaagtgcattaatatttgaggcaaataattttgtgttcttcttttctagaatatctttaatggttgaaaatattttgacttcagatgaatgtatagtaattatccaattctggccaacataaatatagataccttctactatcaattgtttaatagttttaaaccggatatctaatattatgctaaatatgtaattatcgagcattcttatttgaggtttctttgttttttgaccaatcagcctcaggctatcttcatctatatcatattccttcgcaatagattgaaggtcttcaggggatggatcacatatatcaatccataatttatcggactctgagcctgatgatcttacctgttcttttcttattcccttcgaattatagtaaatatgttgctttgcttgcaaggatttggtttctgatggtataggataagaacatctgatattaacatgtcgtatcttgattgcatttcttttatattcactttttttattttagattatttatcaggatacttttcttttaaattattcataaattgactgtagtcatccttggacatttctaactccaatagtttctctaaaattttctcttttctttcttcacctattctgtcttgcggagaagccacagcaaacaaaatcatcaggccacctatctgccatgataactgtaaaaattcagattgccaattctccatagtttgtctaatgaactcattccaaaacagattcattgcaactggttgaccatgttcgtactgttccttataaattgattatatgcagtaattccgtgtagaagccatgttattgcaaaaaacataatagtaacgtacagataacctcgtttcttgaattctctcatgtaaaataaatatcaactttgttaaaatactgctatatgaaaatttatttatcggcaacaagccacattgtaaaaatattagtttatcgaattggtttttttgtcttaaacattaaaaaatcgaataagaattgaaaatatagaaaaggtgttggtgaatgtatattttagtacctgtatttatcttaatcctaatgcatccttcaaatctatctcgtgatcttgttcttgggcaataattcctctcagaatttctgataaagcatattcacctgcttgttcggcctgtctgattctttctctgtagttttttatggtttcctgttctgcacgaagatcaatttctaacatttcttttggattctcagatgattcagcttctttaccctttgttataggggttccacccaaataatcaatttgttttgcaacctttaacgcatgttgtaattcatcagatgcatgcttttccaattgagctgcaatatttccatattctgcaccttttaaagtagaactaaatactacatactgaattattgctttatattctctggcaagatcctcatttagtccattaataattgactttttatctgtagatgaaatattttcacttatcacgattcaccatatatcacaaacaatataaacaccatataacaaaaaattaagattaattaatcattctattttttccatcttgttcaaattgatttagctttatatgctcagaaggttctgtaagacagaatctttaatttgttaatggcataattaagcaacttcgtctgtatgttgatatgttttaatgttgtcagaaaaaattccctcaggagggtcaaattaaaagtgacaagtagaatttattctataattggattctaatacagtttaactacaccatcctgtttctccgaactggtatgcattttgtaaatatgactaagtattaggattataggatattcacaaaagataatcataggggtagtaaatcattatactcataatctttagacctttaattataaagccattggaggtatcaatcatatgggttcaaatattccattaaagatctgacaccggaagtttggtattagcaggtacatttattacttcaccattattatagaaccgcgatccatgacaaggacaatcaaatgatgtttctaggggattacatgttaaggtacatcctagatgagtgcatttagctgaatatgcataatttttccgtgtttatctttaaagattgcaattggattttttggatcgtcatcaataatagctccttcgttaaataaaagagattcaattttggatttgttctggaaattattaattgaagtgggattatcctcagatttttgatttgatttgctattgctgttgttggtgtccttttttgtagatttgttatcttccttgttatcgatatttcttattgttctagaaggattgtacaaccaagtccatttattttgtttttccagtattaaatagacaatagaattcctgctattgtaccataggtcattccgttaccagagtctccggtagcaatatagattttcttattcttgacttcgtttttaccattaggattttcacctataaaagctaatgaatcgataggttccataacttgtccagacaatttatacaaaaccttctcaattgggaagcgttgttttgcccatgcttcaaggaaagtgtgtctatcttcaatgtcgtattcgttacctgttttatgatcttcaccccccattgattagcaatttatattcatcagtattatttttctttttctcattgttggattcattgttactaggattgttcgaagagtaagcgttccgatcgttttctaacttttgaattcgaacataatgatatggtttgatagtgtttgttgaattcaaattacctgtgtcccagtatatgccttttggtacagaacccttctttatcatcgctccaatcacatatgttctatatggaatttgtttatcgtaaattttactaactttatctacaatgggagcattggttgctatgattatgtttttggtattgatctgacaatcatctgaagtttttatacaattttcagaaacttcgtgtacatgagtttccgtaaagatttccccattattagttaaaattgatttagataatcctcgaagatattttaacggatgaaattgagcctgatgtggaaacttgatgcaaggtcctgtatcaaaagaagtcaatggagatctgggaattaattcggtcagaatcccagaccgacgagtagcttcatattctttgtctaatatctctatcattttcagagcctaagaacagatatccgtttagcctctcaaaatcacattctatttttccttcctcaaccaccgattctataaaatcaatggctgtagtaggactttcagctgccaagaccgctccctctttaccaaccaatttctcttaattaaaatatctgtcatctagagcgtgagtaagatgagcagtagtatgcccagtttcaccactaccaatatacccatcttccaaaacagctacacttttacctgcttttgataggttatatgcagctgataaaccggctataccccctcctattatggcaatatctacggtaatatttgtccttaatttatcaaatttaaggggttcaacgccggaaaaccaggaagataattcattgacatcagtagatgattctttaagactatcaaccatttcatgctcaaatctgatagcacaacaaactttttatgatccattcttttcttatcttggtaatcattcaaaatacgagatgtaaaataaagcagctattaatgatatttgtttaaataaatagacgagtatacaatcggcttccaaaaagtcattttttcctgccaatatagtttaagcaatccatatacaatcggctgatgataattatctgtttctatcatcttgtaccacaactcatctacgtcaaagaatttaagttccacatacgaggactatgccaactgtatagccatttaataaattcgccatgaaactaaaatcttaaagtgtattggttaaatattcctcatgtttgttactgaacaacgaatttgtcatatacatatgtttatctcgtcaaatttgatatcgccgcacaagggctcattttcgagacccccgatctataaagaaggatgatggaacctaaaaatgtgatcctataattcaattagcttggataaatataaagaaaagcggttactatgatgctttactccaataatatagcaccatgatatttgttgtcttatttataatatgtttaataaataagatcatgagcttaagtattgattggatggatgtaataaaaaaagaagcaagagggttaaatgatgctgactttggggaagttcaagaagtttctaatggtcaggttttaactcaaaggggtatagtaaatagggaactatttagtattccacaaagtgttgtggaaagttatgatggaaaagttcttagatttaaaatatctgaggtcgaagcagtcgacaaatataaaaaacttttcgagccaaaaccgatagaaattgccacaaattctgaccctgaatttgagggagtacctactattaatgtttcaaagaaaattgatggagcaatagatgaggcagtagatgaggccgtagatgatacagttaaggatgcacttattcaacccacaaaagaagaaacagaaatggaaatagaaaaggaagtggaaaaagaagttgcgacattaaataaggaaactgatgtagaaaatgagcctgttgattctactacaaccagggaccagattcgtcctgataatacattgcaagttcctacgcgtaagaacgaaaagtcttctaaacttttgatggaagataatgaagaagaaacccctttaaagaaagaaggagcaggtatcgcctgaaaaacctttttattatcattcattaggacactcgtctatctgatttatattatcattagatacgtgcaaatctcaaattagaaataattgtggttgactggtcttgttttacaaattctttcattttattctttgtagtggataatccattacatttaatatctttcctaagtcagatacagctgcaccgcattcagaccgggttagtttctgttagcttacataacatttccctcttttttatttcctgactgtccgtcggttcactcttcatgtagattcgtactttcatatgcttattaaatttctatttatgccttaaaattgatattatactagattatataaaattagtattttatgagaggcatttgtaaatgttacaaatatccttgatttattccgactaatatcgatactggaaaaaaatgtatttaatcattccattttgccctctataagaggttttgtaggaacgttcttaaatgaggttttgagtttgttcaacacatccaaatctttctttcttttaatgtcattatcgagatcgatatcaattccgagatcctgtttaataacgtcttttccttctctagcaccaatgaggataacctgtgcattgggaaaatctattagttgtgtatcgtttaacatactaacaagttctcactttcacctaaatcttttaagactttatcagatattttggattttcttctgcactgggaaagccttctagtaaagggctcttgggatttatgacaggtattatatagcttgcctctttttctattccaagttcttcttgagcatttcctggctgatctggaatttccaaaacataggccatctctgtatgtttttgatgtcatacaattacatatttaccagctccaactggtcttgcagcatcaccctctctaaattcatctgaatatagttcgtttgtaatctcatttacatccttaaatatacctcctactcgagcccagtacctttactaggctcttgcctcactctttctaatttctggaagggattttttgcctattacaaataacctgtaaaacttttttgaattcttggacgtacctctattgtttggtgagtcgggggcagttaccataaagacccgtcgaacatcatcgatgtcttttacatttgacgagtttttttttggtctataaaagaagtaaatatctccttgctctataatatatgattcgtgatttcctaaattgagattctctttaaaacttttttcttcagtttttaggccctgttaacttaacgataaatctttagcttaaagacgctctatttctgttatgttaagtaaaagaaataaaacatcttcagagcatatttactatggtctgtatttgtaatttctaggcttatcgcttagaaatactgccaaggcattgtcctttttacatattatcaatagaagtcacgttgcaatttggaattggattcaagggtataaacctcgaaaggtttcaacaagaagaacaaaaatatcagaatacctcattgatgagacattaataaaagtcggctcagaatactcctggttatgggcagcaatcgaaccagaaaataggcaaattctcgcactctttcttagctaataaatccaaggagaggaacatgcttatcgcagagagatttatttcaggtctgatcaagattcacggaaaacatgtcgtatcaacagacggtggaacctggtacccaatggcttgtagattcctaaaactaaaacaccatatcaattcttcgtttgagaaaagtctgattgaaagaactatgcagtacatcaaggatcgaactgaaggatttgacgattactttccatgtagtaaagagaagtgtaaactagatcatgtcaaaaactggttgaatctatttgtaaaaatacacaacaaggaggtgccaaacgcctaagttaacaccgccagtttttatcatttttgtataattaacctctagtctatgtttatgaaagaataagaatctctatctttgagtgaaaggcaaaagtatagactacttgttatgtcctaattaccttaattacatttgtgctcagaatttttctttttattaacttgtataaaagatagattcgctctatcaaatagggcttaaagttaaatcgtcgtggttaatattatcttatattttatataaagtataaacttatcatgcaatttctcgaaatttttattggatgatattcgatctaggaacgatataaatcgtagtcctactttacattatgaaaaaaattaatttgtatgaataatttcatattttctgcaggctatatattagtattataagagaataatatagaagatattgggtcaatatagtgtttatattttcatttaggtaaactgaacacaaaagtagagccaattccgtcatcattattaaacgcccatattctacctcccatggcctcaactagttttttactaatgtacagtcctaaaccggttccatagttagaatctgtaaaaaacttttgaaatagtctaggtaacatgatggaagaaatgcctttaccagaatcagatacggaaatatatacttctctcttatcttctttttttacagaggtagatattaaattctcagaagaattgttagttctcgtgttttctcctttcttaattatttcagagatattttcttgaaccttgatatctatagagccacccgtggcagaaaacttgatagcgttttctagaatgttaatcaatatctgaactaatctagatttatcagcatagatataacaagtatcaaccaaggtttcattagcaaaacttattttgatgtttttgacttttaatttttgattcaattggttcttaacaatatcttttatttcactaatgagatcaaattctttcttatgcagtattatcatgtttttctgactagaatctatccgtgcaacatctaatagattgtttatcaaattatccaacctctctgcgtttctagaaatgcttaagtgatgattgtgaagattatcaagaatttgtttaaattcaacttgtttagtcacattttcatcatttaacaaaatcttaaatatttcatcatttatttcagaatatccagtaatagcttgtgtaggagttcgaagttcatgtgcggcgacattaataaattctcgctctgtttcttcactttcaattagtttttcatttgctgtccttaaattatttgccatctctgtttgttcccaaaggctttcaaagatagagatgtaagagtatactgtgggttggcttgtagaatatgtagatacagcggtggcctgttcaaaggcgtcttttgaatcgtccctaggttctatagctagaaaatatttcctatctactagtaatatggttcgtttaaagtctttctgttttgcgatttctctgacaatataaggtgaatctcgattattgaaatcatccgacagatacatcaagacctttttaacctcactatcgagtggtgacaggactttaaccttaacgtccttctggcttttttgtttaattatgtctattacacctatgttgttttttctctttactgcattaatggacggaaagatcatcaatatttcctgttttgcattttctatgatatttagcaatagcattttagtctgagaaggattatcaattaattttgtagtttctgagccaatccctttctctatttgatcgattcgttcatgtgcatctattgaattcttccacagttcctcaaagattctctggaaatgttcgatatagagaggctcagcggtatgaagaagtttttcaaacatctttttgttatcaccgttttctacaggtactagcaaactgattttccgataatagaaagtttaacgggggtagattgttagtatgtcttattttaatacccatatctagaaatttttttataaaatcaaggtcttctttcttgtcttccaagtgtgttatccatctaattcctgtcttcacttttccttctttatgtttggaaagtagtttagagtatgcatgaaaaagtttttcattttgttctaatactttaaagtaaccttgcgaagtacaacttgaaagaccggccttaacattatgaactaaatctataacataattcaggatattggcggtattttctatagaataaggttcgggaagtgagagataatcctcaaattgttgcattttttgccctccaggcattgcatttttccaaagagtattatatatgtagagattctgttcgacaacatctttactattactacgtattaattcaataattggttttttttcttccaacttattaattgcaatatatagttcactagatacggcaaaattgcctcttatctcttttaaatgtcgaatttcagcatcaaagtctttcataaattgtttacagtattccaaattgtcgactgttatttctgttaacaattttatatttacattgctgttttttaaaactgtgaataattctcggtatgatggtatttccaagataacagaaagtaaattttttgtcccataaagtaagagtccgcttttgcagtttgttgtaatatgatcaaggactctttttaccttttcctcaccctgtattatttggaattcatgaatattcattcgttcttcttgatcttgactcaatttatcattaaagtgtgtaaaagaccgataggaatcaaacatgtttgttgattctggacttttagccgaatcattcaattgctcaaccgtatctctcttatcatcagtatttaacaaagttttatggcgccatgttattaatgtcaacaagagttaaaaatcatggacaattagagaattacgaattcgatttgtttttcgatttgtacgtataatacgtacttgctagaattaattcaattttattttacaatcatatagagggataattgccttgaaaggtaagtttctcaaaagtatgtctaacattgttccatttttaatatcgtagacttttgagccgtaactataagaatatgttatcatcaattttaacctctcaaatgaagagtataaatattagaataagttcgtatgtttgctaagtctcgcgattctaactgttgagtattctagtgatttactctatcgtaattaaaatactttgttatacatattttatccatggttaaaaatcaagagtataaatctcacccaaaaatcaaattcaccaattctccaattctcaaagtaagtttgattctattttttgtatccgtaacattaaatgttatcgacttttcatatcagaatcctgttgaaggtcaaactacgatgtataaatgtactccggatatgggtataaatgtgtcaatggtaaattgtcttactaatactacttcagatacttataatcattcaatagtatctgaaatgaggcaaaatacaacgaagtagattttccttttccttgaaaagttgtgtgaatttgtattgacttttattaccttcatgtggtaatttaatcttcatgagattagaaatcaaacacttttaaatattccaaatcatcttatgacgcgaattactgtaattgcaatacattgaattatagaatagccaataggaatatccaatatgacctatcatgcttccattaactattttgaaatgaaacaatatttatttttttaaataactaatgcaaactaattaaattatcttattgtaataattaaagtatactggcaaattgagaatatcttcctaaaccaactaattcaaaggttaataattttattattaaatttttgaaatattttttttagctaaatggcgagttgtccattccgatagttgcatttcttacatcatttaccgacattgacatattcttcattcccttcggagcattgggcatttcctttgatatattttcttgtgctattgcaaatgtcatcgctatgttagttgatgcgattatacctatcccaatacataaaagcataataaagttaatcctgttcactgatatctattgtactgtaaactttaaatagatattagaacacgcagaggataagggaaataacctcatatattcgagaatataataaggtaatggtaaaagactattaaaaaatgccttttgtaaacttaaagatgataaggctaaatattataataattaacaagctcgctgatttttatttttccattatatgcaaattgaaagtcaaataatccttttagtaaatttcatgtattattgattctaggttcatattatagaatcttgattaaaggatacatttaaaataataaaattagatgaaatgcttactgaaagtttataatattagatatttttggtaacatatctacaaatttctttctgtcaggactagaattagtaaatacaatttcagtaaatccaatgtctacatatttttgtagtttcttgattccttcttcctcatcagatataacaaataattttttttccagagaatcatcatcaatcacctgaccattttcttcaatctttcttggatcatgtacatcaacctcaaagaacgctttaatcatagatcctctccaaaatctaatcgattctaatgccttttgtttattttcatcatatgaagcaggaataaataatatcttttctagtttctcataggcttttcctgatttaaaacatcctttttttaccgccggtaatagggaatcttttatcttgtttatgtctaattcgttagtgacaaatccatttccttcttcaccggctaattgagctgattgtatacctagaccagcaatatatattggaattggataattgggtttagtatataatttagaatctttaaccgaataaaattctccactaaaattaacccaatcttctgaccataatttttttattagtttaatggattcttttaaacgctttagtttttctttatttgttggccaaatatttccagaaggcacttcgtttaatgcttctcctcttcctattcctaaaaacactctttttggaaacatataagccaatgttgcaaatacttgtgcaacaattgcaggatggtatcttaggataggagctgttactccggttccgattaccaattttgtagtttttgctaatgcagctcccatccagggccatgcagcccctcctgaagctcctgtatcccaccaaggcatataatgatcactagtccaacaacgttttatcccctttttatctagatatatcacatcatctaacaagtcaataggattaatttgctcatgcgaagcttgaatgcttaattttgttctaatttctgatgattttgacacagattttttagtatattatgttttattaggataaacaattgatcttgattcgaattccttatctacacactgataagtttttcatttcgtatcttatgtgccggcaagtcattgatcttttaattaatcaatttttcagtgtagtgaatcggatcgttcattgtatttaacaactaaaatggaacattttgaacttatttaattttattacacttgtagtaaaaccatataagattataacccatctaaagcgtacaaatataaacaaagatatgaaaaggttgaattgaattggacagaaaaaaaatgattcatgaaattttatattttgtcagtcctcatcgattgaaataaagttcatagtaatagtaaggttccaatagtttttccaaaataaattttaaaattctagatctctaatatttaccggtaagttaaagtgtcatcgaattcaacaataataaaattatatagtacggttctctgttaggacagatcacaagatatttctatatgtttgataattttaattattgaaagaaaataaataataatttatgtaaatcctaatcttttattttatagatgttctcagcgtcttcctttgttaccctaaaccataaattatgtccatcatatctttcaactaggtttttaggaattgaatacacttctttgtccactacaccagcttttgtaataacattatctagtcggatttcctgtacttctccaagatcagtgtcattgatacctcgggcctctttcttaatgacatcgttccagtcaatattggtgttactcatgattgacattatttaatatcatttaaatagatacaccataatctttaattgagataatatccaaaaacagtttaatatacaaacctaatattcatatttcaattctaaagtttcggatagattacaatgataaaagtgcaaatatagcgtataagattactggttttatatcaagcccaaataataacgagtgaccatggtctctattggaatttaaaaatattaaatcacaatcatgagagaatattgttgacatattggtccagcgattatgaaacaaatacaaaagaaatatctgaacaaacagactagataaatattcaattcttcattttacagttatttgtgtgtcgtacggatatatgcaagactacgattatacattttccttctaaactcaaagttgattgagtaaaaggatgattattcaatgaaaaaagaatggattgtgagttttcctagcatattattataatacgattgttataagttagtacgtgccaatgtattaatcctgcatatcatgctagtgatttgagaatgcattaataattaataaaagcaaaaatagggatgcatttgattactctgaaatcaaagatttagataattcaagtattgaagaaaaaattacattcactaaagtatttcatggttcagaagtagcaaataaccaaattatagagtttttcaacagatctaattagaagatttattcttgtgtaagtgctgatgcaccttaagtaattatagaaacagaagcaattaagaatgcaagaattgctgcattcaaaaacagaggcgtgaaactcagatatgtgactgagataaacgcagacaatttaaaatattgtagagctgatagccttctctgaaattagacatttagaaggaatgaaaggaaactttgaaatatctgatgaaaaagaatacgtgggggttgcaactcttaagaaagcccaacccatatctcagcttatatttagcaatgtgcctgaaatagtagaacaacagcaatttgtttttgatagtttctgggaaaagagcatacccgcagaataaaggataaatgaattagaggaaggaataacctcttctattaccattatttaaaatgactacaatgaagcagagaaaaaagaatttgaaatgattagaaaagccgttaaagaaatacaaataatttattctactacgagtgcatttcatcttcaggcgaaaaggggagttcttgaacttttaaaagaaaaggctgaaataggaaaaaaaattcatataagtattctcgtaccattggattagtcgaatagagaatcaatatctcatcgcctcttaacccagactattgacaacaatattgaaattcaagacattgcatcaagcatcgaaattaaaataaaatcgcggctagtagacagaaaagaagcaatagttattgagttaaagcatttacagaaagatgatgctactgcttcaataggcttctcaatctattctgacagtataccaacagtgttatcctattcctctatatttgaagtgatatataatcaaagtgtactttctgaagaactaaaacaacaaggcgatattaaagatgaattcatcaacactgcagcacatgaattgcgaactcctacacaagctattacaggatattctgaaataaatgatgaattgtttgataattactggagtaatagaaaaaatttgacagttgaagaaatagcaagaatcatggtgaaacttcatgagcatcatgaaaatatttccagaaatgcattaagattaaatactttaacaaataatcttttggacgttgcaagatttgagtcaaataatggtggtgatattttattataaaaagagaaaatagatttagttaaagagattaaaaatgttgttgagtttgaatttggccaaaaaataagagataaagccatcaaaataaattttataaacgacagtctaaatgagaattgttgggctcatgtggataaaatgaggctaaatcaaatcctaattaatttggtagataatgctatcaagttttctaaaaagatgatgacattaatttaattatcaaagatatcgacagttttggttttaacatgaatatgaaagaattagatcatacaaactctactactggtagtactcataatagtaacactccagacaacttgatccaagaaagaattaaaaatgaagaaaggaaaagaaaggacatggtatatgttggcatatctgatactggtaaaggaatatcttcaaagataatgccaaaattatttcaaaagtttaccacagacatgattttggaaccggtcttggactgtatattacccaaaaactagttgaggctatgggagggagaatatgggcgtttaataataatgacggaattggctctacttttgtatttagtttacctgtgacagatacaaaataattctacggaataacaatatccttaataaaatgatcaaaatcatcatcctatatattttgtgctaatttttatacctttaatttaatactttatggaattctaattcaaaattgattccgcaaatgattattttagaagcaaattaccaatatcgaaggcactcaaaagttctgtcttattgtcttattccttttatggtgtcaatagactttaaaaatttcaaacttttgtcctttgcaagtaatataacccatattagttcccaaatgtatcggtattctaacttgctaatcttctttgagtgatttccatcgataccttttgtttttctaatatgttttcataaactaaacaatgttgtcttgctatggtattccaatcgatattgtgtctaaattctttgacatttagtgcaaacctttcatagtttttttccagttcaacaaatgctttttcaaaagaacgaggttttctatatgatattatacctaagttcaattctgaaaactccttgaaaaaacccaggtttgaagagataaaaggctttccgtgacctagcccatcaaacatgatgccagatccagaagagactttgtaaggcagaaatacagcgtcgcaagaaaaaaataatagtgacagttcttcctctgtaagatattgcttgcctaggttaatgatttgattattaattttgctattccttaggtctaaactggcattttctgtattgtaaaaatttttagaataattaacaactattttccaattctttggcatcctcatattttttataatatcccatccctttgtggatgtaaagaagccttgcgctaatgctagtctcccctgtggaggtaatcctagtttttcccttgcatctttctgcgtaataccaatagtagttggccaggggtctgagccgtgatatataagattggttccgggtatcaaagtcttcatataattagaaagtactattccatatgcactttttgacattatttgtttatttattcgatgcaatgatggataattaataagttgtttccaaattttgtaaaaaacatgcagtcttagtatatcattactattgccttgttttgtatttagtaattgcatccactgtttgaaatacattgatgtatgaaacgtagtaataattgggatagtacatttatcataaaatttatccaaccctgttctggttttaggaggatacaaaggatttagataaaagccatatagtccatgctcatgttgaatatgtactatatctggattgtactcttgtattatatttaggagtaactcggaatttttcttattatgtggagataatccatggtagtctccagaaccatgagaatcagacacgactttaacatctaaattatttgaacgtaaagatcttaccaaattatatgcatagcgtccaacaccaccatgcatgggagggtactgggtactaaccattaaaatttttaaatttgggtgcaatatttaatgcatttattaatgtgtataatagttaaaatacatctaacatatactttttcttatgattattaattagtcctatacgatgtttattattgttcctgaacatggtatgtgattatttaccaaaaaaaatcattacgaaaattttaattaattatttctcatagatcttaaaaactaaagttctcgaaatagataagatcttctattatctatattatgctgtctattattgacctaaatgactttaattgatcattaaacattgttaaacaataactgttatgtaaaactatagtgacaattaaaaaaataaagcagtgagaaattctaaacaagctgctgatgaggttgaagacacactggaagaaacaggagataaaattaaaacaggtgcaaaagctgtcggaaataaaataaaagatcccgatagagatttagatactaaataagattaagaaaagttaaaggaaaatctcaattaattacaagttttctatttattattcaaattcatttatttactagtcactgggccaattttcctatatcttatatgttaaaaataccgggaagaagttaagaatatcctagttagcagagtaaataatgaaggtcaatatgtctccgattcaagataactatattcaacatgagaaatatttggttccttcgtaaatgtattacttgagtatgatgaagtaataaaattattgttgcatgagttgggatgagcaacccagagaatggttctcataacctttgcatcccaactggtcacaatacgatgtcttatctgtggggaattaggttttggcctattttgggtaggcatagcgactttttcctttatatcaactatttatagtttgaataatagatctttacaatgtctaaaataaatatttcgttatttggaattgtgattgcaactatattttcaatgactcttagtttacaatcagccaatgccgaacccatgactatggatattaataaagctaaagatcctggtcctggatttggtacagaaaagatagggacactctcaatcgatacccaaaataaaacattagatatttcagtaaatatgacagcaacgcctaaacaggataaagtctttgaagcatggctggttgacgcagacggatctaactacaagttaagcctaggttcacttgatggaaatagcttgaaagtctcagataacatggtaaatccatatacctatacacaatttattataactgaagaaccagttgatgatgtcgaccctaatgcagcaggtacgtatggaggagctgaattacaggcaccattcggacaataatacctttttttcttttagacctagttaatcatgatcaaacatgaccattacgtactaaattttgatagggcatgtcgactgttcgtatatgaaacacctacaaatattgcctaagtgttaatggcaccaataaatcatgtaatatgcacaaagcattgccgaacaaatagaagccaagcgtttgaatattagaattaccgcccttgggaaaatagatataatcgatcctttgataactattgctacctgcttactaaaattaatagtaataacttcggtcaatcggtcatcaatagttaataaatccatttcatatcagatttaataaaccagtaattggttgtttaatgatcgttcccaagaaaatattgttgattaggatgtccaaacttcttattagatgatattctccctacaaaataaacaaatgcatacatcttcgtaatatactgcatgattagttgctgaaagtctcattatttgttgctattttatcggcaccgggtatctccgaccatactgcgggatctattatattaataatatttagtattcctatgaacatcataaatacgattatggatatgaaacctattttagaaaataatattcccattttgtcattgtcatttagataattgaagcaagcaactgaaaacataattacaataacaactgcaatagttacaaacaatgaacgattgggaaattcggctggtgaaaatgaagatattgtaagtaatattaggaatccaccaatgatagtggcatcgatcattagtagatctttgggattcatcttcataaggacatggccccagacttatatctttataaattccattctgacatttgaacttgtagcataagtattactaaacctactagctactctcttactgaatatcagttggaaaggtataactctcaatagattttctatctatagtttgaatattatttttgtcgcatcttgttccttattgtcaaaaatctcataagctttcggagcttcatcaagtttcattgtatgactaattattttggtagcatctattctgccagtttcaattaaatgcagtagttgttcattatatttcttgacaggacattgtccaagtctaatagatagttctttgttccacatttggccaaaaggaaatttgtcgtaggttgagctgtaagctccaggaaccgatagggtagagaattttctagcactctgacacatccaatcaagcacctggattgggttagcaggttcataaatggggtcggaaaccttagaatgatcatggatgccaccagaagtgttaccattacctgaacctgatgtatgaccaacagcctcaaatccgactgcatcaatgcataagactccctttcctctggattctttatggagtacttcaacaggattgtccttatcaaaatttatgatttcagcccctaaatccttagtctttgacaagcgctcatctagatgatcgattgaaaagactcgagcagctcctctaagaaaggaactcataactgcaaaatacccaacaggaccagcaccaaaaactgccacatcatcgcctggctgtacattagccatgtcagccccaaagtatccggttggaagtatatcactaagaaataaaacttgttcatctttagatatgctatcaggaactttgagtgatgcaacagtatttgcgaagggtaccctgacatactcagcttgaccaccatcataaccccctaacaactgagtgtaaccgaaagcagccccgacttctcctttagggtttgatctattacattgtgaccaaaacccccggttacaaaaccaacactgtccacaacttatgttaaagggaattacaactctgtctccctccttaatttcgtgcactgccggaccaacttcttctattactcccatgaattcgtgacctaaagtctgacccggttccattccaggagccaccccatgataaagatgcaaatcagagccgcaaattgctgaagatgttacctttaatatgatatcttctctatccttaatctgaggttttggtttgtcatcgattcggacatctttagctccatgatatactagtgacttcacatatcaagaatgttaacatgatataaagtcgtagtttattttggatctaatttacttatgatttgaataatataagaaaacattcctagatttagataatctctaattccaggattatttaggagttaataaacttcaatcctagattagtaataaatctattattaaagtcaccgaacccgcttctatatgtcattaaattggatagctgagcaatatgcatacatgcacggagatagtgacaaccaataaaaattcgaaagtctcattgatactcggctcctttactctacacgttacgaaatcattaatgaaattagcaagcaacagactttaagcgggaaaaaatccatttttaaattaaattcaaaggctttttggggatttttaaaagtgaactcaaaatatcaaatagtcatctcaatttttgacaaactggtgatacaaggcatatggtcaaaaattaaattaagagtaatatattgtggtttttcctggataaatatttaaacatgctagctagatacaaataaacttcctatattattcactgggttttttatgttttgagatcgattatacaccacttgatagcttcaacaacaaagatgcgaaacatggatagatttgtttattaaaagtatgagttataggtttgaatccctattcatatttgcggatccttaaagtagaaagcgagattttgtaataaaggcaataaatgcttaaggatgcgaaaaaaggatcgtaaccatgtcctttcaaatgatcaaacctaagccggatgaattaaaacagacgtgtcggttgtcgagtaatattcgcctctacatttactcccaactaaaaagagattaggcatactattacgagaatacgtttttgttctcatatacaacatcgtataataacgttgctgtctcaaaaacgttaagctagtgagtcatactagcgaatcttgcaagcaaaataataaacttgaaaatacattatactagatattaataaccttttttgtatattaaaaaaatatgagtttagttggaggaataattgttttgataataggaatcatactatatgcgatagccggaatgttaccaccagtagccgcaagaattgctagaattctaggaattgttttggctatcataggtgttatcctaattgtgcttgcagctgcaggagttgcatttggtttggctctatctttgtaaacttttgtaattgaaatcaaattaggtgcacacaatactttttaaataatctacgttctatgatgtactctatcatattttttgacttgtcgcatactcttgtctgccttgttcattgattcatatcctgaaaatgggggggagagttcatgtcagatactgcaacgatactagaatatatcatcgacgatctattgccacaaataactattttttctttgagccaaaaacatgcatatatctaacaatgatatttatgacggtatatgacaatacggaagcaattatagaagagatagttgtcgattctattgccgaatattccaattttagcagctgaaccatgagaatgaatctcgtgatgttatttacaatatcaaaaatagagctagcgaataacattttgataagaatttgcttgaatttttgaatgtttagttttccagttaatttctttgtatatctttgtttgttgtctaggtgaaagagaatcgcaaaaattaatttgtaagtaagataaccagctgtaactgtcaaagctgagtttagtacaaaatcgatagaatattcagctgaaatgtgtgaaacgactaaactaagcacgaaacctgaaatccctgatatcaataaattcttgtttaaggaaaaggtattgtaatatttcaaataactatctttgaagaacctgttaattttatcaactctccatttcacttataatcaaaaatatgcaattaatatataaatacatggaataattaaaattaaatgtgcattgataccggcctttttcatactattttaaatagctatgcgattggtctttttttaagacactcactccagtattatgccttgtctaaaccttgagatctggctatctcgattatcataatgacatttgtaggggtgcagcgaaagtattatttatactgcgtcgtcttccgattagttgtataaaagtaattattatttgtcatactaacccttatattacagcaatccaaaccgacaaatgtaacactattgttagaatttccttaaataaactcaaatttaagcatgctattcatcggtacgttccttattgttgaccttatgctgatttaagaaaggattttattctttatcttgtgcttatgtcttataatttaaaagcacataccgttctggtttcagatagactccaataatcatcataaaaaaaagcataaaataggaagaggatcgcacttttgcaaaaagagaaatagataccatatctgcttatttacaatgtattagaaaatgtattatgaccaaaaatttaaagggcttcagagtacagaaactgagaaattcaataaaattttatttaccccgaatagaaggataccttgaagttgtaaaaaagttatctggcgagtttgaagggatgactcttatagagtttgatggttattttgaaaagaaaatcgaacccacaaagtatgttcgggtagaagtacataagaataaactaaacgaaaagagcttgataaaactggcaaacgaactcagaatgattttaaaacaaaagagtatcgcaatagagataaacaatgaaatgatcttagtggaagccgataacggctgaaattgaaaagaaacctgtccattcgaacaactcattgaatatgatttaatggttatctaatgaatttaaaccagtttctgtgtgtatttgatatatcctgcataattaaattttcaggaagttattatcattaccctctatgtgataatagaatatctagagggtttgaaaagttgacgtcgttctcatgctaatttatatgttaattaatctaaacattcaatttttaaaagatgttcatatatattggtacgtatattaaatgaattattttgttgaggttatctcaaaaaaggtataaggtcttgaaaaaaagaacgtatctattattgaagatttagtttacacctagggattggtaactcatgtttatgtctattgtttcttatccactcaataacggttctaatatctttttgatccacacccactattttagggactggacaatttttcaatatcttgtcaaaatttatttgaccaagaattttgtcaatagtttcatatgagactccgatttcaccttcggcggtctgtcccttccataaccttgcactactttgtttttcaataatatactgtggtacctcaatatacttggcaattttcctaacttctgttttataaaggtctgctattggaaaaatgtctgctcctccatccccatattttgtgaagtaacccagttgcaattcgctcttatctgcagttccaaccacaatgcctcccataacggcggcatagtaatagagaattgccattcttaatctcaccagaaaattcgcttttgctagcttgttccgagggaaattctttattatatgatttttacccttaccaatatcaattaactcatattgaatgttcaattttttggagatttctaatccatgttttacatcaaccttaggagttacagaataatccggaagtaacaggccgaataccttgtcagatcccaaagcttgtgctgagagatatgtcgtaacagtcgaatctatcccaccgctaattccaatgacaacacaattagcgtttcttgacctaacctctttgttcaaaaatcttgaaattttctttaacacttttctctcttccaagattcattaaacccccttctaattgtagcaagtcgcatatgcctcaaaatgtaattatcttttataatttaaattaatggcttgaaatctaatgcagagattggattagtatttgagatcgcgctataagcagatatttaccatcaattgaatatcttgaccttttcttatcgttactttatcttctaagagatttatcaaaaccatttcttaggagaggaaaattgatttattcttgctctctcataacaattcaacctttgttaacttgtttgactttccaattcatgataaattagaacgcatagccaattcagttagatgtttgacaacgtctgctaataccaaaagtgtctgacaattttggacaaccatcggtattaatctcgacctgaaagaatatggtcaaaatgtctcattaatactctgatttctttgtaattatcaaattcttcgaaatatcatttagcaaattatctactattaacaaaagtaattatacaataaggtttccttagatcttataagtaagcatagatgtctaaggatttttattctttatttgagtcataggtatcctatcattatgacaacaccaatctatcagaaattttccagctgattgagtatctttgtaaactcttttaatgacaaaatcattatcatttggaatacaatgaaaatctgtgagttcaagtggagtattattgagtgtaataatatactcgatgttggccttcacggcagattcaatacctagtggtgaattttcgacaactagggcttcagaaggttttagttttagtttagaaagagccgtattgaacggatcaggatttggttttccctcttccaattcctctccagataggatcaaatcaaatttatcaatgttgttttgttctaggaggaattctacctctttcctagatgcaccactcactacagcctttaagcaattctcacaattgagtgagccaattaattcttttaccccaggaaatgctgttgctctatggatcttttcaaataattcttttttccgattactaattttttctacaaggttcccatctggtgattcgagattgtttcgtttgaaaatttcctgaataagtacggggctaggcatcccctcaagtaagaacacatttcttttgtcaatctcaactttaactatttctctgaatgcgatttgaaaagcttctgcatgaaatggcattgcatctattagtacgccatccatgtcaaacaaaatccctttcaaccttaaccaacaaacttccgttcaataatataaattagtgtgaataatagaatatatgctgatcccgccagcttggaacataaagggcctactcattagggcatatccgtcaaatggactaactatcttccttgataaaacagtcagggttgacatttgtccttactatcaaaaaaaattcattttattatcataaataaaattagaaaaatatttcaaactttgattaaataataccttcagttaatagatggcctaaaataaacagattttttttattaaatcaatctcaaattaaatgatagattgataaattaatttctttaagagaacatggagtcaaatattatggtcattcacttgatcaaatatataaccaataatgaacttttaactaataaattaatcctaatatcatagtattaacataacttagttactttcattgttgtaatacactatcaatgatttctcttaatgctgcaattttgactggtttttgaacaatttcgtttatcttggctagcttgtacgtctcacttaacaataaatcctcaaccatgaatgctgttatcagtatgattttgatcttagcattaatttttctaatctcagcagcaagctctattcctgacatctgtggcatacgtagatcagttagtatcaatgaaatctcctttgtcccttgcttaaaaaattcgagtgccattaaggggtcagtgaaggttactgtatcataacccatattttctaaaaatgccttaaataatgcagccagttccctttcgtcttcaatgaccattatagacgtaggttctggcatatcgaatactctagcaagtcaatatttaaccgtttttaatatcgatattgactaggaaattgtttctggtcacacgagttcagctaaatacactaaggaagcgaaactaagaattttaataacccctgctctgcaacctataaagttcaaatgataattataagatctcttgcgtaactactccaaacagcttttacgaaaagatgtgtgaatatatcgcaatttctaaattattttaaaaagttacaagaagaaaaatcaaacgatattcgtattgcagatgaggttgaatatgttgttgaccgtttgatttggttataactgtaaccgtatatagatatattaaggaaaattaattaaatggatgtgtcgcaagtgacacaggttaacttttctcatatatgcaaaattattcccactactaccgataataaaattcaattcattaaccagattgtgactatatactaatagtatgttaaccaaattataaagataaagacaaaagggaatctgcatgtttttgtagggtttttataatatcaaaaaactaggttgatgttttataatcgtttgaccgatatttaacatggttcataattgttgctggtttttattaaaaatcctaattatcttacaatattaattattagatcttacataattagtcaaacagctttgtgtccttctatcttttagataagcctatgtccttccttcttttgctatcgtatggtatgaaaggttatccacaaaaccattacttacttttcaaatcgttcactggtcttttaatcaaacagtttgatgacatctatcaaacgatggaatcaaaataccaaacatgataaaacgttttctgtctcgcagaaaagatagaaaaagagagaaagagcagtaggagcaggatgaaggtagtttaatctagacataaaaaaacaggtttgtcatgattttggtttactataaccatacataacctataccttgaccttaaccttgaccttcagaggatatctgtttgatttagaccagagtaacgtatgtagagacattcaaaagattgatggcttgataaggtagtctaccattcctcaaaaactatcagatgactacaagattgaacagaccagaggaggaagttgagcagtaccttccaggctttatggcttttagacggtacagagcaagaaataccaaaaccaaaggacaggatgagtagaaagatgtactactctggcaggaagaaaaaatatactttaaagaatctatacacaactaggcactattaattattgttaagccctgaatcctaaagtcgtttagagtttttgaaatgctatatctaacattatcataaatatcatttgatttatcgggatttggctcaggttactccaaatacaaaagaatctcgctagtagtaatcttctcaattaattttttacgttctatttttaataatagatttaatccagaatcactcgaaaaatatgagtgatagttaccgttatacgatatcaagccatattcaatgaggtaaaacaaatatttttttattaattcatctgaaatgggcaatattctttgaatattcaaatatatattatggagtggagagcctttcaaacacattagcaatataggctgaaaaataaccgcctgcataaccaaaatattttgggttctctcttcatctctaattaatttcataatcgtgacacaccaatcttacttatactggattgacagatgtttgtcctcagacggaagaattcattgtaaaatgggacttgcacagtttccatatccaaatagttgttaaatgcttcgcatgtccgatccgttcctccaataaacactgggcacattttagacaaattgatattatctaaaccggtcttgaccatgtttgaaaattctagagtaacattctatataaggagtgatccatctaatagccctagtgactaccttacaacaatcccaaagaaacgggaccaaggatgctgctcctattgagacaacctgccgactgttccattttgtcaactaattacacatattattaccattggcaggtaataaaataaactattacagaaaaaacatatctgtacagaagtcattatcgaatagttaaactctgttgatatagtgtaaacaaaaccggcaaaattccataggttctccttcaacagtaacgttcattctatcatgaatttctgttaattacacaacagtttgatattgactatagataatatcgtcctcggttgtaatcgccatctcaccctttttttatgtttattaatttccgtaggattttgaaatgtgtcaggattttttattactattgtatctatttatccatcagtaacgtctgtcctatttgtaaaatgaaatccactatgtaaaaaactgttattagataccactccaatggtcgtttttgtcaaaaaccgtttacttattcttttgtctccttaggtcaaatcgattatttcatttatattactttcataagtagatttagttgcaattattccagtaatagcagaaatcagcctactacagatttgatttcttaccaatttagacctctcgataattttgcccgcaatcctgtctcagccacatttaaaaattttctaaaattagattttgaatctactttattactaaccattagtattgtaacaattacatcaatcgtttggatgtcatgtcattatatattgatagtttcatgcaacattactcgaaatctgtggataaatcaagtgacttattcattacttcactaatccctccaaatatatcgtcataatagcatttgtgttgatgggtccaccatccttaagtgtgattaaatcatgaagtttaataatttaaatcctatatattcaagattaatgtaatgcctttctttcaaaaatccattagtaacttcattgatataccctcttcccccacaggcagcatatgagtagaacctttctgtagttactctcgagagcgtagggtccttttttctgatttcacggtgaatagaatttttaggtcgttactaaaatattttattggtattagttaaatgtaatgccaatttattctagtttttccacccttcgaatcagtgttcactctaataaccaagttatctggcatacggtgtaacgaaggttaagcagtaaagatgaccgtatacgaattaagcattatcttgggaactcagcaagacccgtgaatcaccatcattgtgacgctataattatgtaagtccaatcttcacaaactctcaatgaatcttttactgattgtcgcagtggttgtaagatcagctttccgggttaatgtcaccaataagctttgaagattcaattacacttacaacttgtaaatcatcgctacctgaaataattttcgataaagttggttttgcctcctttcccaatatcattgcctcctttcccttccgcattaataccaaagtcatgctattttctgttaaagtatgggcaaaattcttggctaaatccaactgctgttggaaatttgattctttatctgtcatggagtgaatgaattccttagccccatccagcttatccaatattttatcaaccgagctttcgttctccctaccatgtggtaaaactttatgtttggaggtatcgttagtgcttcctttaaggaaatcaaacaattccggttctagtatgtcgatactaattttgtttgattggttgtcggaagtagcaacgatatctacggctgatttattctggatttcaatatgtaattttccactttttatagtctttattgattttgctaacttgtcaatcaaagaattgctggactttccaatcttcttgtcgtcaatgtctgtcaatccaatcaaatctcaattatatgttggaaggcctctaagggcctgcttgtcataaaattcagactgattaatatcattagttgacttaattattgctgtcatagccttgaatatcctctctacttggggtttctttacctttcttctcctcaaagcttccgttgtttttaccgtgaacttccgcagatattctaattttaccgttcacagtaaggctgccactgcaaatctggcaccattcatgaccttgagcttttggcatttctatcttgaggttatcaaacgaatatgtaactactgcaccctttccagttaacttttcaattaattgttccaaaattggcggaccttcttctgatattttatgggttatcttatttagattattattaaattgatccattctagatacgattatataattacatgaaacgttataaatcgtatatgttttgttatcttaatatctagatttaattacacatattttcatcaatgtcaggaaatatttctcttccattaaactactgagataactggatcgctttatggaactttatagagatccaataataattacttgcgcttacagctttagaaacattatttatggaatcaaaaatgtcattaacatattaccttaatcacagaattatctcattctggttttaggatcacttacaactggtctatttattgtaatacaaaattaaaaagtttttgaaacctggctattaacacaatatatgagagaaatagtgaaaaagactaactttagtgtaagcatattctacgatgagatgatttgcaagagcttttgagttgaagaataaatacgaattatttgtcatctgaagtctaacaaaatgcggtttagggtgttagcaaatttgtcaaatagttgattaataattattaaatagtgagaagattttgcattctaagacctttatagattatgataggcatacagaagtgcttgaaaagcgttggatggctactgggtctttaatattagtctttgatttattgaatagtttcctctggctttgtccattgaaagaatactgtggcaagtcataattgttattaaaagaaacaaagaactttaaatggattatgtggattattttagtagttgatccctgaacattgctcttttgtatcagacggcatcaaatgccctcttcctcctgaattcattatcgaggtagaagataaaactgacaacaacagtaaatttatgataggagtaacctgttctgatcacagggccttattggagaagaagtttcatttactacaaaaaaagaatactattccttcgggaaagataagtttgacaaacataagaataattcacacagactgtatcaagggcacccgagaggatgaggaagaggttcggatcaaaaggttagatgtctagatggcgggtttattattttaatagcaatgccttgtcttgacgacctttcaatacgtgaataatattagaagctgccatttctgacatcttatttcgcgtatcgatactcgcgctccctatgtgtggtaatagaactacatttttcatcttaattagcggattgttacggcggattggttcatcttcaaaaacatccaggccggctcctgcgatcagcttctcctttaatccacgaatcaaatcaccttctttaatgatctttcccctggatatatttattaagtaagtattctttttcatcatttttatcttttcataatctattaaatggtagctatcttcatttagggtacaactaattacaatatagtctgaatccgaaacaagtctttgtaaattgcaatactctagcttgtagaatgatttatttttcctaaattcatttgaatcaaaattcctttttgtaaataatattttcattccaaatcccattgctctcctacaaattgcactaccgatttttcctaagcctatcactcccaatgtcttatgatgcaaatcccttccaatcataagatcgggattccaaccatatttccatttgcctattctgaggtatctgtcagcctcaactaatcttctaccaaggcaaagcatcaacccgattgctaagtcagccgtcgtttcggtaagtatgtctccagtataacctacccttatccctctattcttagcttctaaaacatcgacatgttcatagcccgtactgaaggtgcttattactttaagtgatggaccagcagcatccattatttgtttgtcaatcttatcgttaagaaaacacaaaattgcatttacacccttcacttttttcaataaatccggatatctgagaggagccattctttgatttacaatcaagtcacagtgagtctctaagatttttaaacccgcatgtggaataggtcttgttaccaatacgatcggtttaattttttttaacaaatattgtcaattgagtggttgttatattatttgttaattctgtatgaatgatctatacaaaataatttgacaagccttcgaccaaaaaatttatatagtttatttaatcaacaccagcatttcaatatttaacctggattagatgtacttttctagaattactagattctgtgtatttcgattaatgcatatggacttgctattgcatcggcaccatattttactacattatcaggagggcaaaagaattacgctatatgattaaaatataaacactacttgatattttaagattggtatgttgggctctaccaaaagatagtggactttgttgcaaagtctaaaatccatactagtaaaaataaaaaacctgaatttacaagtatatttttatagactactgattattagaattcatgcaagaccattctactagtatacaagagaatggaatgaattcaatcagtaaccgtaaaaaggttaggatcaggaaaaagaccgagtatgaaagtaagcctgaaaatttggaggaaaggttgattgaaaaaaatactaaagaatcaccagaaacgttgtttgcaaacatagtgggatatgaggacattaaaaaaatttttaattatgcttttaattcatcgttaccagttcatattttgctggtaggtcctcccggttctgctaaaaccctattcttgatggaatgtatgaaactgtctcgttcctattttacattgggcagtcacagtacaaaagcaggaatgttagattacttattcaataacagaccaaaaaatctaataatcgatgaaattgaatacatggcaattaaagatcaagcagcattgcttagtttaatggaaactggaatattaagcgaaaccaaatatgaaaaaactcgaaaatcaatcatgaggacgtgggtttttgcatcttgtaatgacgaaaaaaaacttttgactccacttttatcacgtttctttgtgctttattttaggaaatatgattacgctacttttgaaaagatagcaaaccacattttagcaattgagtgtaatatggattttgaagtctcaaccctgattgcgcacttagtttggaataaactgaaatccagggatataagggattgtataaaaataggtcgaatttgtaataataaagaagatgtttacatgatagtaaaaactctgataaggtataacaacacaaacgctagtaacattaagactggttacattaaggatcaatgaccgaaaacatttagaggcatttatttgaagttctttgccatttctcattacttaatatgagtagaataatttagtgttcctattttgaataaaacatccaatttgaataaaacactcaaaaaattgaaaatttttatctgtggtccaactctgtatgaaaaaagccacttggggcatgctagaatttttattttttttaattttttaattaattattacaaatgtttgggacagtctcctattaccatagtacaattgactgatgtcgatcccaaaatatttgctaaaatcaagacagctaatgataatgataatatctcacttgagagtattaccatgcgtcatctaacccaattgataaaagacttacaaaaattacaagttattaacaatttcaccttcaccagggtgtctagctttcaggttcaaatgatgaaccaaataataaaattacttgaactcacaaaggcttactcgtatggtggcaatatttatcttaaaatagattcagatatccagagtccttttggtcttacactcagggaattggataatatgccaattgatatcgcaccaggaaaactggatcaaaaagatattatgctttggaatgctgagaatttctatgaactatctattaagggcgacgagcgctccgaattttattttaggaatttagttagcgggatccctggatggcattttcaagattttcaaataataaaatctctttttgacaatcactacgatatacatggaggggcaggcgagttagtctaccctcaccatgaattcatttacagaatttcacatcaaatacaagggaccagccatcaaagtaaaaaaaaaccaatgtggattcacataggtattttaaagatcaattctgaaaagatgtctaattctagaggtaatacaatcgccatcagtgactttctaaacaaatattctccaaattctctaaaaatactttttttgggtgaacactacgacaaagattttagttttgacgaaaagaaattgtcggaggctattgttgtagataatgaaatttcatcgtattttgcatcggagtacgtcaagaacggaaaattagtagaaacattgaacgaatctgatgcacataagttttccgcgtttttaagaattttggataataattatgatacaaaaaccgcaatcagttatataagaaagtgtattagatcttctgaaaatgctagttatgttaagaagatgactgatttacttggattacagtatcattgatagcctgaaatcaaatgaaattgaattttgtaagagttggagcaatcagacaattaactttgactcctttcgcattttagctaatcgtgaattaaaaggcgactattttcttaatcgagtgattttgactgttggaattgaggactcaagacttgataagaaatgcatttcaacaatcatgtcaagactaaaagaaatttccaaacaacaggatattgatgtttatattcatatcaatgataacctgtcattccttaaatcgatacttgaacagaacggcttgagaaaaattgataaattgacaggattggttaacatcatagagggtcaaaaattcctttcaaaaaatgaatctaaaaaacaagaaccagtagttaatggagaaacttgcaaggtggtcaggtccgtcgatgaattcgaaggatggttagatgtttattcaacttcatttgaaatcgatacagaaagaagaaccactattcgaactagtctgcaaagagataattttagagaaagtaaatttattttgtatgaacaaaaactccaaggtaaaacaaatgggcacaatttaagaccggtcggatgctgcttgcttttccctacaaatgacgtcctggggttatactgcttaggcaccgatcagaagtttcgaaatatgggtattgctacaggccttttaaattttgcaataacttatgccaaaatgaatggatttaatcttttagggcttcaggcgctgcatactgatcacatattaggattttatcaaagaagatatttcacaacagtttatactgatgccatattttctattcctatcagttagatttaataaatcatttgacccacttattaaaaatctattgacatttcttgactgtatacaggaagatctcatttttccagtattcgtatatgagaacgagcacgcttacaaacaaagcttaaattctggatacatgaacaactcaaaggtattttcgaaaaaattaatcaatagatttgaagaattggctcagctaaaaatatctaacttgttgttatttggtataccaaaaaaaagagacggcctgggaagtgaagcttttaataggaatggtgtgattcagcaggcaattcaaacaattaaaaaaacttttggcaaaaaatttaacattctatcagacgtttgtgtgtgccaatataatactagcggacattgtggtgtcactaatggcacaatagaagatactaaccaacctaaacatatagttagagtagataatgacaagaccttaaatattcttggaaaaatttcattgagcctttgcgaaagtgggaccgatttcatagccccatcgtcaatgatggatggtcaaattttgtacctttccaatttgttaaagaggagcgggtttaaaaaagtcaaaattatgagttattctgcaaaacataattcttgtctatactcgccatttcgtaattataattatcataatactagctttatagataaatcaagttatcaaagtaattttaacaatcctagtgaatcaatgcgggaaattttacatgatgtaaaagagggatcggattgggtaatgataaaaccttcgttttggtatatggatttggtaagattagctaaaaatctagtggatgtccctctggtggttcagaatgtctcgggtgagtatgctttactcaaagaaggagcaaaaatagaccaaattgaccaacaggaatggatagttcaatatctcaaaagtttaagaagggctggtgccgataaaataatttcctatttgatgctcgatttgtttgatgaattttgagaaaaatcgcccacatatcgatttgaaatctgattctaattcagtgtttctggataggagatcatttgaccactagaggaatcgacgtaatattttgtattatttgcaataatttcccagccatagtggataccaccagttaggggttctaccgtattgcccaatacctttcctaaatcgtgagtttcctgatctgcttgatatatcgtcccattggcatttaccattacatattgcgatgtaaattttccatcaagatctgcaaaagtaatcttgcttatttgatccaaggattgattatacacatcatgtagaattattaaataggcttcttctggtataagtctaggagatgtggaattgggttgacttaatgagtaacttagcacccagtacatcgccaaagtaaatccaatggataacagtactatgaatattactttattgcgggcaacatcaagcttcattaagatattttattgacagaaaaacactatataatcattgattcatgcctttacgattagaatatatatcaattcttttaaaaactaaatatcccgcggtagctcagcctggtagagctttcggctgtagttgttggcagattattgctaatcatacatcagcctatcaggcttacattcaacagtaaccgaagagtcgcaggctcaatcaaaaaataagagattattttttggagtaaatcctgctcgcgggatacaaaaaaataaaaattttgtttattgattgggatttattatggcacgtccaatgattttaccattccttaaatcgtgtaaggcctcatttacctggtcaagagcgaatgtcctatccaagacagtacgtacttttccatcggaggcaagtttcactaattcagtcaaatcctgaaaagttcctgtataagctcctgtcagtgtataccctctcaaagggatcattggtaggttcaattccattgatccaccaaatagtccaaccataattaccttacctctttttcgtaacatattaaatgaatttgcagacgtaatattgttatttacaaagtctatgacgacgtctgttcccgacccgttggtaaggtctttgacctcttttaccacatcttgtttctctttggtattaatgatgttatctgcaccaagctttcttgcttctgccaatttttgatcattaacatctataacagttattcttgatttgaatatagctttagcaacttgtactgccataagccctagtccaccagcccctacgattacaatattatgcctatcttccaaacctgggattggctttgctttttttactgcgttgtacgctgtcaatccagagcaagccagggatgatgcagaatcaaattcaagttggtcaagtttaatcaaaaactttgaatctgggattaaaacatattgcgcataccctccattttgataaattccaagggttttcggattatcacatagattctgttcgccagataagcaagcaggacaagtcccctcacccaaccaagggtaaaccaacaccttatcacctacattgaagttatttacactgttaccaacctcttctattgttccagatatttcatggccaggtatcagaggaaacttaactcctctatcttcgaccttcatgaagacgcctttgggtcctgcatatccgccctcccataaatgaaggtcgctatgacacacgccagttgctgcaactctgaccaaaacttgatttccttcaggtttaggtttttctacttcattaattactaatggttcatttgttttaataatttgagcccctttcatatcaaaatcaaggtctccttgtttaattatctttactaacgaataagtattcaaaagaatatattaattcatattccaaacctattgatgtcaatgatgacgacgaagagccgtctgaaattacatggtgacgaagattatgaggtactgagacatcgaacttttcaaaggatggatattatagatgtaattccacccttttcatgaaattaaaataacatccaaagcatatacaattattgtggttaaactctaaaaatcggaaatgttttgtactaaagacaaggattgtaataccatttatattttttagcagtactatgtttgaaaagttacttgataaactgcggaagaattttgtttaatgaatttttgtaatttatgagctgtaaaattatatacggtgaaagttcatgataaatcaaatttaatgaattcgatagaacggtccctattatgttcgatatatagcaataatttgattgatagtcgaattcctaatccaatattaccttatttaatgaaaaaattggaacttgatgtgaccttttacattaatcaattatctaaacttgaagacctaggcttaattgttacaaaacaaaatgaacgtgattctgaaataagctctaataatatgacatgtacgcttacgaacttgggtcgtgaacaaattaaggttgtgcttgtaggtggggtatttgatctacttcatgttggtcatattcataccctaaaatctgcaaagttattaggcgatgtcctaataattgtagttgcaactgattccacagttagcagcttgaaaaaaaatcgcaaaatttaccatgatgaaaaaagccggttagagctagtttcatctataaaatttgtagataaagccgtaataggaagaaaaaaatcgatatacgatacagtagaattcgtcaggccagatatcatagccttaggatatgatcaaattcatgatgaagtagcgatgaaaaagaattgctttgatcgaggcttgaatctagatgtagtcaggctttcttctccacttcccgaactcaaaagttccttaattaaaagcgagttgggaaactctttttatgatctttaattgtttctcacagactctttaatttttatcacaacattatctccatttttgagattggatgattcttttaagttcaaaggaccgatgacctctattaggttgttgttatgatgggtcctttctaataaaagaacatgaacctcatttaaaatttcagttggttgtgattcaaattcctcacgagagagttttggctcttgagatatcgtagctggatagcatctaacccaaccaaaggttctatctgaatttttgaacccagcaatgtagactgaggggtaatttatcaaatcttttctggaattcatgtagtttttatcttcaatttttacattcagtgttccagggaatggctcataacccaatttatgttgaaactgtttcttataaccatccaaggacatatagtacgcgccttcccccattccagtaacaatcttccccttaaaaagcacaggcttaaaatgagattcctccatagatatttttaataaattataaatattctgtaatatttcaaaaccagtttctgttagtttcattccaaatttctttttattctttactctttctattaggtcttctttctctaagtcgattaatatttttgaagctgtttgttgtgacctattgattaaacgacttatttgggtactggttatttctaaataactatccttacccccatttgacagtaaatgaatcataactaaaaaatgaaaatagttaaagtttgaatgatctttaaccatcatgcgcgattatctgctactaataggttgactaattaaccccatatccgaaaaagtttgaacacgaacatctgggcttgcctttttcaaattgctgattctatgacctataatgtactttatacccgatttattagcggcttcaacgagcctgggagtaactatgccgtctagtatcaataggtttccgtcttctaagacagatattttctttaatatttcagatattggaatcttaactatctttttcattgacttgtcaaaaaccattgcatctaaagtttcatttatctcttgaaatactttttttacaatggagataacttcttcgtcttctttagaaatcatgttatccggattttgcatttgatcactattatcataattattttgtttgtttatactttgattagggaaattcctattatatgtgaacgagctattttggtcttgattgtttgattgattcaggttatgatcaactctatgatgattcctaatctgttgaacgttggatgggacggtgttagtatcgttgattttatcgttaataaattgttcaacgtccttcaatatttctgaaatctccagtggagtgcattcttctacctctctgccagggggagctctgtatactttttctatatctactagcccttgtaactcctttagtatcaaatctccagcccgatcgccatcgataaatgcgataactcttttgccctgggtcaattttaatatagtctcgtcaatttttgcaccttctattgctattgaattatcatatcctgctcttaagagatttataacatctgcacgaccttctacaagtattatccaatcgctgtcaaatacgccaacaccacacgctaattgtgcctttccaaatgttgtcaatctgcctggtttgctcgcatcgtagacatcctttagcatttcctctccttcactaatagttttagtagcccattcttggacaattttcttagccctgtcgactattactttcttctttatcgctctaatatcatcgataccgaccaaggaaaattttgcctgaaagggtcctactttatcgatactttcaatggccgccgcaatcaaagctgcagtagatatatcagtactcataggaatcaaggcatctccacgtgctgagttggatttagtatctacgttcacttcaattctgccaacttttgaaactttctgtagttcgtttaggttcatctctggacccaacagaccttctgtctggccaaatattgcgccaatgatatcggccttctcgactagtccatctacatcaaattttagtttgacatgatattttacaataccagtatttggcatttttataacttcattattaattttatttatcatatttcactgattatcataactatgttgtcttaccttgattaagtttttcgttttaaaatatttccatttttattgacacctttaaatggttataatataaatatcttatagagcttgaaattattcaaaaatacctttgtttttttttaatctcataacatactgttataaaatgattttaactcctcaatagtccttattttcccttgtgtgatttttattatcttattcctgtaataattgtctatatatctttgatttagtagatgggaaatttttctggtcattattttaccagtatcatccaaatctaaaagcaaaattagtttcttatatttaactctaaaattatccgccaaatcgacaatgcttttgtagttgtgatatatctgaatgtttccagaacaacccaaatatgacaatgcttccaaatctcttttaccttctaccaaaatcagtgaatctttggtagattcgttattaatctgatttacaaattctcttaattctctaattttctccagtcgttggaccttatccattacttcattctatttgattatgagcctactctcttcattttggagccacattttggacatgaagactgattatgttttgttccgcaactcatacaataatagctaacggaactaccatttcctccaaatacagagcccgccatccccatcttcttcatggctctatttctaatgtaataactaagcaaaatgaaaactactattattaccggtaaagataacggaaacggtagcaagaacgagattgcaagacttattcctaaggatataccaatccacaataattgttgagacaagaattgtttgttattatctatcactatctctcagtgttatatttaagaaacattatatataaaatgtttcccatgatgaccatagaccgagttcagctatattctgtgtaatatttgtatctcttctctacttctttattctttccttcgtgaactttattgatttcaattttcaatagactcttggcatactctttaaatttaattccctcttccgtatctggaaatttgctaagagaaaaatcaaattgactcatgaactcgataaccagatctctaaattcctccctcgagggccttttgttattgttgacctttaaccatgagacagctaattgtgaggcatatatttttgctatatcttcagctaatctgtcaacttcaaagtagtcagccaccaaataaccgccatcggataatttataaattttatgaggcggttctaatttataaaatagaaagataaaaatgtgaatagtttccaaaaaaattattatgccaattaccgatgtaacaaaaagaagtattgcacaaaagcgtcgattatttttcaaaatctgttttgattgcggagcaaaaaatccaataggcggaactagatgtagaaagtgtcatggcagtcaaatgagattaaagaatagaaccctaggtgcaaagaaataatctggggtttggcatatagttattccatttttctaaattttaaataagaaaactttaattatcttttttgattcctacactttgagataacaaataatatgaagcacccaaaggttgttcttactgcagatagaacattaatgtctccctatcgaggaatttcacttgcatcattttttggatgtgctcctgcacttgatccaaaccgtagtcatgattctatttggtataaaatattaggaaatcaagtaactcctaaattgctttttgattttatttgtaatcctattgctaattcaaacggattggccgattacgctccatatggtttgagaaaacttgaagccgccttgttgagggacggatatgctagggaggatgtagttgttgctcatcccgatcatattgataaatttattggtccacaaactgaattcgtaggtacatatgaaatggacccgctaggaatgggccctgttacaatgacatttacttatgggaggaaacaaatgtcttacgctgaattttataatcgtgatctgcatcatcgaattaatgcggccaaacaaaagaatggaagcagggccaaagtagttgtgggagcttctgggacttggcagtataattatgacccagccaaaattgaagagtatggattgtacgcaatcgtagagggggatttggggggcattggacctgaactagatggagtaggaggaaggttctttgatgctatgatcaataacgagttggaaaccgctaatccattcaagaaatccgagtttaaagtcgaaatcaaagaatttgatagaaacggcaggaaatatcacggtagatttgttcattattccagagaaccaaaggtagatgaaattcctgatatagtcaatcccagtatgcacgggatgattgaggtaatgaggggatgcggaagaggatgcaaattttgcgacgtcacacttcgacctttacgctattatccagtagaaaaagtgcaaaaggaaatccgtgtcaatatgaaatatggtggattaaaaaatgcctgggtccatagcgatgatatctttgtttatgggcttaatcctaggacaaccaaaaatatgcagccaaatcgggaagcaatagaagagcttttcaaggggataatggagacaggaatagaacatactaatcctacacacggaacattagctggtgccattgcagacgagagacttatccctaatctttcccggataatcaaagctggacctactaatcatattggtgtacagtgtggattcgaaacagggagcataagattaattggaaaatacgccgacagaaagttagccccttttagaccatctgaatggcattgggtggtaaaagaaggtgtaaaaacattaaatgaaaattactgggtgcctgcattcaccctgattatgggattggataacaatgagacagccgatgatagctgggaaaccatccaactcatccatcaattagagaaagaacaacctgattctaaattcaccgtaacgccgttgacttttgttccgattggtctattagaaaagtccgacttctttgacataggaaacacaatggatccagcaaaattgggagtgatgtataaaacatggcaacacaacttcaaatatgcaattcataaattcatgcacaaggtaggtcaaaatgaccctataaagaaattcttttttgcatcacttgctaggacattaggtggtgtacctctaaatgctatggaaaaatatgcgcgcagaaagagtcccgaacacgagcaagtaattgaaaaaattaaggcacagtatgcataatgatatctaactactattcatcatttctagttcgcttaagaacagttcgatatctgaataaattggactagagacggatttttccaatttttccatcatcaacttattagagaatataatgatttgatatttttccttggcatctatattgattagagctgagtgtagaaatcttatggccgtttcattatgtgaaacaacaataattctggtttttccccttgatcttttagataatttattaatataacgttgaaaatcaatatcaaaaaagggatcaattaaattctcaacattccctataacggtaggatttagtccctctcgcctagtcaaaatatctatcatgatacaaataggtaaagattcatcatcgccagatactattgcaagtaagcagttaccgaattttcgatcataatttttattagtgtaaatagtgtttctcaataatctaaatgagtcagaaagattggtaagtaagtgaattttttcggttttgcctatttttcccctgttatacaattcgagaatggtattcaaaacagggaaactaacatcggtaaaaatttttctcaaattgatattccggttgatcagactaagaactatattgtctgttatttccttttggccattgattagggattcaattaacttttgctgtatctctagaaaattttcatcttttagatctaaattgattatcccggggtctaaaaaccagaagttcacggagccgatttttttcttgttcaggattttttggaaatatagaatatcgagatattttgacattgtaatacgattagttcctagtttgttagaaatttcactactagacataggattattattttgtaagagatctattacttttttctgaatgtccgataaatcgtacttcttatacattggtcacaatgttttggccggaatcatttaaaaagaattttttttttgatgagttttcgaccttcagaattgcgatgctagttcatataacttttcgtaccaattttttgcctttatcacgctactagctgcgagtatcccttttgagcctaacccaattgcaattcttatgtcttcagatgtattgattccagctccgcaaatcaattgagaccgacttgcaactaattttaaatgttggaacgaatcagttattaaagaaggtttttctgtagcaatagattttttagtgccgattaattctgggggctctattgctaaataatcgggactcatagaactaatatctataagttcagacaggtttttggcgcaaacaatacttagtaggcccaacgaacgcaatctcggaatcaaatctctaatgatttcttgatttattggatgctcgctatggtttattaacgaaccagctcctcccacatctttaacgatctctggaattgaaaaacccgtacttggacctggttgttgtatatctatatgttgggctattacacttaattttgtattttttgccaaccatgctaataggacctgaggtggtgaaaggattatttcagtatccgtctgctcgctaaccctttcacttctcttgcaagggacaatgccttatcccccgaaatctctagataattctttaaattgattataaggggtccctttctttctgacattgcgtttgttaccggtttatttgaatttttcattcaatttagccattcttgcctcgtatcctttgttatactctagttcatcaggtacaagtgttgctggatggataaatccttgaactctcaataccgttgcgcgctcagatgctattctacgctgatattcccagtcagcagtcccaaatccatcatgaggacctgtaagcttaccgttgtgcatactaaataataagcacgaaactatgggaatggagtaattcaaacttgctgcagagtttaatgtaacaggcatgaatggcatgtggtgactccccctagtattgcctgccactatatgagggtcattgaaagcactacctgcttcttctgtagcgggaaaattcttttgggttcttacgattgcgataggatcatcctttcccacataagttcctgcgatattatgaagtctatcggtggaacatgacacaatctgttcacgctcatgtgttaatacagaatgtaccacatacctgcctggatacatcaaagcagcctctagctctggtttatcgttccataatttaagatcggcaattttacctgacattacatccatgattctaaatatcacaccttcggccaactcctcgttaataatcagtcctgtattacttcttgcgtcgacaaacattctccaaaatggaaaattatatgcccctggttcagtcttgtctgctgcaaatacacaaaatacttcgctaggcctttcttccatttctatttctgctactccggggcccatcccttttacatttccagagaatgagtctttaagtaaatcttgccctgcgccgtataatccctgttctttagcaatttttgtcccctcagtaaatgcatcccaggctagtttgtgaatttctttattatctgtcccaagtgtatgggtcatcacaatgtggatatcatcgccagtgtagcctatataattatcaatcaaaattccttttccattttttaacacaaaatctttaacagtctgaaccaatttatcactaggtctggtatgtcctccgattcctccaatgtctgcttttattgctgaaacagtgatcttcatactcaacttgaattctacgaggtttaaaaatttttgtttcccgcaatttctgactaatttgtcagtgaccgtaagattttgaactacaaactcgttctctttggtaaaaattattggatcatctgatttgttactgttatttttttccaatgatcatactattctgtcattaatatcgatatttgttgccaaaaaaagtaaccaataaatatccttagtattactttactgtcatgcgtgacgcaaatttaataaagataatgatcgaagaaagagctttggtgaaattgataaagactataggagaaaaggagtattcaacaagagacttattgaagaaattgggcgcttatgggtatggtcataaattactcataaaagctgaggataaaggattggttgaacgaagtaacgtaaaaaacaaaacttacaataaattaactaaagaaggaaagaaaattataagattagcaaaggagataggagtatagctttagatcaagggattgacaaatcttttattctaaacatttttatctttttctgtttcacaaagattaaattattaattatgctacgaacccctgattaatgagcaaagtaattctggctttttctggcggcttagatacatctgtttgtgtaaaatatttacagaatcttcataaacttgacgttataacacttacagttgatgtaggtcaaaatgatgattttgacgagattaggagaatttcgtcagaactaggcgctattgaacatatttatattgactcaaaacaagaattcgttcataactatgttactccagccataaaagcaaacgccctataccaacaaaaatatccacttgctacagcgttagctcgaccgctaattgctagtaaagctgttgatacagctaaaagatataatgctaagtatatttcccatggatgcacaggcaagggtaacgatcaagttaggttcgatcttaccattagatctttggatcctagtttggatataattgctccaattagagatatgaaccttacaagggataaggaattaagatatgccagtgagactggaattagaattagcgaaatagctaagaaatatagtattgatgaaaacctgtggggtcgagctattgagggcggcctgctagaaaatctggagaacgaaccttcaagtgattccctaaagtacgttcatcaggacaatacctctactgaatatataacgatcggattcgaaaaaggaatacctatttccctaaacgatcaaaaaatggatctcgaaaagctaatcactgatctcaaaaatattgctggatcacatggagttggcatagttgaccatattgaggatagagtagtaggtataaaatctcgtgaagtctatgaagctccggctgcattggtattaatagaagcacacagggatcttgaaaaattggtgttgaccaactccgaactccgtttcaaactattagtcgatgaacagtgggcatggttatcatattcaggattgtggctagatcccctattatccgacctgaatgcttttatcgagaaaacgcaacaaagagtaaacggccaaataaaggttaaaatgcataacggatcctatcgtgtggtagggagaaaatcaatgttttcactatataataatgacacagtaacttatttgtctaattctaatttcgaccaaactttggcgagaggatttgtcgcgctttggggcttacaatctaccgcagccaattcaaaaattatggaaaataaggagtaaaaatggtaaaattagatatcctttttgataaattaaggtttgaagaaaaggctctttataatactgcgatcaaaaaaggaatcgacgtaaggttagtcgattcaagaaatatcattattgatacggatgatttggattcaaatgaatttgaatttggagatatattacttcaacgtagcataagccactttcggggacaatttcttacctattgcttagagttgtgtggttataatgtgattaatagttcaagaatcggggagatatgtggaaacaaattattgacttcaatgatcctcaagaaaaacgacatacctactcctaaatcttatttctcatttaattctgattctgcctttaactttatcaatacgatagacctggaacataatccattagtatttaaaccagtgattgggtcttggggacgtggcgtattccctgtgcggaataaagaaataggcaagataattgtagaaatgaggcaagagagtattagtccattctcaagtattttttattttcaggaattaattcacaggccaccaagagatattcgttgtatagtagtaggtgaaaaattgatagcagcagtttatagatattcatctgatgatgaatggcgtacaaacgtagcaaaaggcggtaaggctcaattaattgaagttacctccgaattagaggagttagctctaagggcctcaaaagctatagggacaggggttctaggtatagacatgatggaggatcaaaaacgaggactggtggtacacgaaataaataatacggtagagtttaggggagccagtctagctactggaattgatattgccgatatgataattgaatacgtaaaagattgtgccaagaaatagaaaaaactataatcgacaaaaaatttaaatgaggattattgaacgatttattatttatgaaattcattgtcgataaatactttttatttgaaagagaggtaaatgaatatacattgaggaattctaaatgaagattggagttataggcgcttccggttttgtgggtggagagttgctacggctgctagtaactcatcccaaggtggatgtatcgatggttacatcaagacaaagggtaggtgaatatgttcataggattcacccaagtctaaaaagtttcattaatttaacattttcagatcttaatcttgataaattgactgacacatgtgacgtagtttttgtttctgttcctcatggtaaatctaataaaatcgttaatgaactttttaagaggggtattaaaataattgatctttctgccgattttagattgaaaaatccagaggattatgttaaatggtatggatgggaacatccttatcctgaaatgctgtcaaattctgtttatggagttcccgaatttcatcgcgaacaaataaaaaatgcaaagttagtttcttgtcctggatgtatggctgttacttcccttctggcattaaaacccttaattgagaacaatgtgatagacaccgaccatcttgtagtagatagtaagataggttcatcaggtgcaggcgggcaggcgaattctgccacacaccatgccatgcgatatggtgttattcgtccttacaaacctgccaaacatcgtcacacgggagaaatagaacaggaactaagtttgttaggaggcaagaaaattcatgtaagtatgactcctcatgccgttaatatggttaggggaatattgaccaccaatcatgcatttttgacaaaggatctaagtgagttggaactatggaaaatgtatagaaattcttacaacaatgaattcttcgtgagattaataagagacaaaaatggaatatataaatttccagatccaaaatttgtaatagcatcaaatttttgcgatgtgggattcgacttggacgaagataataaacgaattgtagcaatgtctgcttccgacaatttaatgaaaggtgccgcaggctctgcaattcaaaaccttaacgtaatgtcagggtttgatgaaatgacaggactaaaattcactccagttactccagtatgattgttataaaaatagggggaagtatagtggagggattaaacccttcaatcctagatgactttagtaatttggtaaaaaaacaaaaatttgtaatagttcatggtggaggtaaagatgttactaatattgcaaacagcatgggaaaggaacagaaattcattatgtccccggcagggaagcgtagtaggtataccgataaagagactgcaatgatttatacaatggtaatgtcaggaaagatcagcaaaaacattactgggatgctacaaagtaaaggtatatcgtctgtggggataactggcattgacgggggaatgattaaggcggatcgaaaaaagaaattggtgatactaaatgaaaagggaagaaagatgttaatagacggaggctacactggaaaagtttcagcagtaaaccccaaattgattagttgcttgttagataacgattatgtgccaattatttctccgatagctatcagtgatgagtttgaatttctgaacatagacggcgatagggcagcagccaacgtagctggagcactacaatctgaagtggtaatcttcattactaacgttaatggacttatgatggatgatcatttgataccagatctttctctagaggaggcaaaaaacttgctaccccggattggacccgggatggaaaaaaaagtgcttgcttgcacagaggctttgtctatgggtgtaaaaaaagctataatagcctctggttcagtacaaaatcctataatgtctgctcttgaaagtaagaattgtacagtgatctcgagatgcaaggcgtagagagtgaagagtcctttgtcggggacttgtatcaaaggttccctgttaatatctcaaaaggaaaaggatgcaaagtttgggatatcaatgataaagaatatattgactgtatgggcggatatggggtggccctagtaggccactgcaatgatcgggtcattcaggcaataacaagtcaagctcaagatttgattacatgtcatatgtctgtttataataacatgcgttttaactttcttaagaagttctccagaatagctccaaaaaatctgcaaaaaacctttttcacaaatagtggaaccgaatctgtagaggctgccttaaaattttctagaaaatacactggtaaacccggcgttttggcactaaatgggggttaccatggaaagacttttggatctctatccgtaacttataatgagaaatatagaaagtcgtttttaccattgttggacaatatgcaattcattccatattctgaatcaaacacgataccagagattgtgacaaagacaaataacaagataggaactgtaatagtagagcctattcaaggcgaaacaggaatcattatgcccccttccgattttctgagggatattaggaatgtttgcaatgaaaatggcttggtgcttatttttgatgaaattcaatctgggttaggaaggactggaaaaatgtgggcggggcagcattgggatgttgaacctgacataatgtgcttggcaaaaggtattgcaggtggtgttccaatgggacttacagtcatgcgttctgaaattttagactgcctaaaggtcggagaacattcctctacatttgctggaaaccccttagcctgtgcagcaggttctgcaaccatagattctctcattgaggataagcttgtttcaaactctgaaagcatgggccagatttttaaatccggtctattagaaataaaagaaaaatataaaattgttcgtgaagtcagaggacttggaatgatgctaggggtagaaatgagatttgatgtgaaagacattcttcttgatggtatcaaaaatggtattctgttgctttattcaggtagaaacattttaagattgctgcctccaatagtcatgaaagaggaagaagtgaacaagtctctggaattaattgataagctaatttacaacgaggagaagagacgatttggctgataatctaaatagcatagatgaaaaaataattggaatattgaaaagtgattcacgcaggtcgttcgttgagattgcaaatacgataggaatgtctgaatctgcggttcgtcgtagagtaaagaacttgcaagatacaggtgtaatccgaaaatttactatcgacatgggcccatccaataaaaccagtgccataacactaatttccgtaagttctgtagctgatacatccaaggtgtctgaccaattattaaaactcaaaggtgtggagatcgtatatgagatcaccggtcaatatgatatagcaaccataatagtggctccaactatattggaaataaactcatacattgatgaaatacggaaaattgatggcgtatctgatacgaatacggtaataatcttaagaacgttgggaagcctaagctaaattaaacccttccaaagtttattgactttgttattggccatctaattcataagctgaattatgtaaagcctatcaggtagttatttttagcaaaagccattatatagttgatttgatatatttattaacgaaaacatacattatataatcgattatagtaatattatgcatcgaatgtcactaaaaacagatgaccccaactattttgctcatcaatataatgattccgagaaagataagaaaaaaattagaatcctggactctactcttagagaaggagaacagcatccgggagtatccttctccaacaaacagagaatccagatagcttggttgttggattcctttggcgtagatcagatagaaattagtccaatagtttcacctgatcatcacgaagcaactaaaattatcatgaagcagggtttaaaagctgatattgtagcgcacgtaagagctataaaatctgatgtagataaggcactagattgtgatactaattggattgcaacatacatgggtatttctgatattcacttaatggccaagctccggatatcaagagaagaagcaaaacagagggcacttgaagtggtagattatatcaaatctcatggcctaaaatcccgctttactatggaagacgcgagcagaacggaccccgaattcttgttggaaatgtgtaaagaaatgaaccagagaggaatagaaagaattagtattccagatactgtcggaatcatgagaccacggggaatgtataacttagttaagatggtatacgacaatatagacaattctaaaacctctttagatgtacattgccataatgacgtagggttggcactttccaatgcgttatcggggtgtgacggaggagctgatcagattcacacaaccatagatggacttggtgaacggactggaattcctacgttagcagaaactgccgttgcattgaatttgatctataaatccaataacagtttcagactacatctcttaaaggacttatctcgaactatatctgattacactagaattccaatccatgaatcaaaacctttggtgggagatagtgcttataaacataaagcggggacccatttagcagccatcttgagaaatccctctgcatatgaaattattgaaccaaaacaagtaggaaatcgccgtaaaatcgtatttggtgagctgtcgggaaagaatggttctgcctacttgttgtcgctattaggtttggattctaacaaagaaaatgcagagtctttggccaagggattgaaagagttaagaatgggtgatattttggaactatttttagatgaaaaattagagagaaaaatacttaatgaggattatgtcaaaaacaataaggattaagaaaatggcaaaagttaattgtaaggaatgtgacgcggaaattccaataccatctgactcaatgcaaggtgaaatcgttacctgtcctgattgcggggaaagttttgaattggtgaaatctggtgacgaatttagtataaagcctgcacaagtagttggagaagattggggacaataaatatagaggaagatgcatcttctctctatatcctttttgataatatccgttgggaagagaaatctattattgaaaaagcaaaaaaaactcaaataaacataaagcctattgattgcaaagaccttgtactttttcttaatgaagatacaaaaatgtttaaggataaagtaattttacaacgatgtataagctactttagaagtttgcattcaacaggaggtctagaaggattaggtgcgagaatgattaattcattgtatacatcctttatgtgcgggaataagttaatttctcatatagaacttcagaaaaatgcaatacagacacctaatgcaatatgtgcttttaataccgaatcctctattgaaggcatcaaaaaatttgggtatccagtagtgataaagcccactgtaggtagctgggggcgactaattggactattaaacgatgaggaagcggtaaaggcagttttggaagatagagaacatatgtttcctatttatcacattaattatttcgaagaattcatcaaaaggccacccagggatattcgtgctattgttattggtgacgaagttgtggctgcgatctaccgatattctgggactaatgaatggaagactaatatggctttaggtggtcacgcttccccttgtcccattacgacggagttagaagaaatttgtgtaaaatcatcgaaaatttttaagggagatatagtaggagtggacctgatggaaagcgaaaaatatggattagttgttcacgaagtaaataataccactgaattcaagaatactgttcgagtaaccggggttgatatacccggtttaattgtggactatatggttaatattcataagaaataagaatctagaaaatggtctctccaaattttgccatagagcttttaaaaaatactttagaaatctatactccctcaagatcagaatctcaactggccaatttcttgaaagatatttgtatggatttaggatttgagacagcaaacattgacagcgttggaaacatggttgcagttagaggaaacggaaaaccgattattctcctctgcggtcacatggataccgtccctgggattgtacccgtaagactagagggtgattatttgtacggacgaggtgcttccgatgcaaaggccccattagtttcaatgttattggcagcggcagacattccgaaacaagcagggacaattatttttgctggagtagtagacgaagaaggcaatgctactggaataaaaaatctggtaaaagatactacactaaatcccgactatgctatatttggagaaccaagcggaatagaaaatatcactatttcgtataaaggtcgccttgaaattcgcctgatatgtgatgttgataatagtgctcacgcgagtgctccttggttgacattaaacgcaattgatgaattatataatgtatggaatgaattgaaaagtgtatttcagaaaccggagatcacaaacacaaaaaataaggccgatcaaataagttacagcgttacggaaataaatggcggcactagtcataatgttactccgcaaaaatgtagaatcactatagatatacgtattccgactaatttatcttgtgacaacgtattagaactgattgataagcggataaacgagattaaggatttcattaaaggtgtaaagatcaaataccgggtagaagataaaaccgaaccctttcaagcaaacgtatcttctccgttagtacgggcattagtcttgtccatcttggatcaaagaaaaaaaaggccgttattgttaaagaaaactggaacaggcgatatgaatatcctaggaaatattttaaatatccctgtcgtgacttacggcccaggagaccctcattcatctcacacagtggacgaaaaactgtttgtacctgactacttgactggtatagaaatttacaaaggtgcgttattacacatggtgaggcttcacaaaaatcttcaagaaaaatcaaataccgtaaattcaaagtgagatacacatggtgtgtcataaattgatataaattagaataattactaagatgcattaatattagaaaatgttgtatataattggcatcggtattaatgaattcgaatccttatccataggatctatcgaaatactaagaaatagcgataatgtgtatatagaaagatttacaggatttatttcagacgaatttgttcagaatctatctaatactctacaaaatacaagcggattaaaatccagaaacgatgtggatattaagttcattaagagatggtttattgaggatggaagagagatccttgaaaaagctcaaaaatctcatgtttgtattctcgtctacggtgaccccttagtagcaactacatacaacgagctacttgtgagggcaaaaaaactatctatagattttaaaattgttcattcttcttcggggatcctgtcattaataggagaatccggacttcatccatacaaatttgggaagatggtcaccatgatggacgatccaatgtcttcaattaccgtttataacacaatctatgaaaacatgtgccttggcctgcatactctgattcttacagagtacaataatgatgatggaaaaaacaattttcaatcaagttctgatccattcttcctgtctcccaacagagtaatagaactattactagaaagagaaaaagaaatgaaactaatgaatttttctatggaatcatatgcaatggtagccagtaaaataggacatgaggaatcgagttttagttccggaacaatagagtcgctattgaagttagaatatagtggtggaccaaattcgattattatcccaggaagactacattttaccgagatagattcaatcaaatatcttactactatgtttgatgagccaactgaaaatactctgcatatttcccgattggcacaccgtatgttagacaaatacataccaaatactaaagtcgcccttgataacatgtatcagcttatcagaacagaattgtcggagcttccaaaagattatgcaccagtgattgaaaatgcagaaaactacttactcgatgcacaagatttttacaaccaaggaaaacttgaactagctattttaagtgttgggtacgcagaggggctaattgattctatccggtttcaaaaaggtatgaacccttggtaggtttttgtatactaattttttatagttgatagtttagaattgttaatagaatatcttagtttagatgtagcaaggaatgtccgagagcaacagaaattctcccaatgatgagaacaatagcatcaataatacggacgtcgatagacctagacggagaaagagaaatacagtgggccatttgccactagagctccttaaatttgtcaaaaacgaatcatattcgttacttataaaaggtaaacctggaactggtaaaactacattcgcactaactttattagacaatcttaatgatgatagtaactacttttatatatcaactcggctatctttgaaacaattattattttattacccttgggtcgaaaaatttttttccaaggatgagaacaaatctggctataggtttgaagatgctcgcctagatgaacctgaatcattatttgaaagaatcactaatcaattgatggatgttaaatctcctgtcataattatcgatacatgggacactattgcatcatttatggatcgagaatctagactaaataatgagagagttttgcagatttggagggagcgggcaggtgcaaaattaatcttcctaaccgaaacattcgatcttggaatattagattcaattgttgatggagttattactttagataacagcatatttgagtcttctaacaacagacaattgacaatcaataagcttagaggcttaccaattaggtgtagtagttactattattcgttatataatggggtgttttatacttccgacctaactagagatttaaatttgttttcaacttttgaaaaaattaaacccatttatgagaggtcaaaactaattcttgagggttcaaacaagtcaaagtctagcagacccggcgactttgatgtgaaggaactttttataaagaataacttcatttcaatttttgtagaaaatgagatcagtaatgaattgttgatatctttgttattaaagccgctttgtttttggataaacaggaccaaccataaaatgatgttaaataattttggccccggtttcaggtatttgtgggagagaattttgaattatcacttgacccgcgataaagttatcgacaaattattaaaccaagagattgatttttcaagttcatttggagtccttaggggcacatcagagaaggaagaatctcatgaaggtgaaaatggcaatgattttaaaaagattaagcatttaaaaactttaaattcggggccaagcacgaatccaaaactatacaatatacccatacaagatgaaatgaagatcctgaatattttaaatgcatctaatctaatatctctaatagatgatgaatctttcttaaaagtattgcaagataactttgccgcgaatgtgattgttgtcaatcatcataaccggaacttaaatttccaattcacggaaaaaggcatacacattaagatgaacttggttggaaaaaatattttgattagacttatgaatgatgatattatgttgtttgaaacagtaattgacagatcccgcttgtttgtggaatggcgtcctgttttttgatcatctattgtaagcgtctgtcaataaatttaatttaatcaggtcgtgaaattaacaaatggaagatatattatcagtttttgatttaacacttgaggatagtaggaagttatttgaaaagataacatcgattcacaatgatcagaatcttcaaggattcatttcggatattggtatgagttcaggtgattatcttaattttcaaataccagataatctagttgtggtgggagacctccacggtgattttacttcgttaaaaaaaataatgaatgagatcaactataaagagtatttaagggccgagtcaaacatactaattttcttgggtgattatgttgatagaggtaagtattctctagaggttttgctattcctgtgtggtattaaatctttattccctaataacatgttcatgttaagaggaaatcatgaagcgtatcatagatttccattttcagcgtttgattttcccagggatctccaaaccaaatttggtggttctggccaaactctatataccaatacaatagtgccatttttcgattctctttctagtatttgtgaaataaatggctttggccttttagtgcatggtggtttgcctgtcattgaagatatggagttttttagaaattataaatttagattatctgagatgaaatcagacggagagctattagaagagattctttggaatgatcctagggaatttaccgatagaaattggcagtcctcaaataggggtctaggtaaatactttggaatcaatattacaaagaattggctaagtcatactaatactaagttaataataagaggacatgaaccgtgtatgggttataaattcaatcacaataatacagtgatgacacttttctcatctaaagatccatacccaaaatttgaatctgcatatttggaaatttcaaaaaaacaaataggatccctgaacctaactcttgatattaaggattttgttcatggcatttaggaattttatgattcatatagcaatttaaagctctgtcttggactttatttctttacatcgttttcttaatgaaacagttgaaatttctgcaacttggcatatttccacttgccttaaaaattcattgcaattctgggaagcgagataaattatagatcctgccaaggctcttggatttttgcctattgaaattctattctgttgtactagtgaaaatattcgcagagcttctcttttggtcttttcgctaagttgtaagcggttacatattaaagtaacataatctggcccatgcaaaactggcatctgtagggagagttcctttaatattaatttatagtgagacatgatatcttttgtggttatattacaagctgttgcgatgtctgtaatcgttttaggagtggcagtttctctgcaagccgcatataacgctgcccctactaaccctagtgttgatcgtcccttggctaatttcttaattgctgcctttctatagatataagcagctccttctatcactgcctgactgagatataatttatctccaaagttatttaacagttttaaggctttttctaaattcctagaaacagaatcattaagctgactctgttattccaagtccttaatctctggatattatttttttgagacgaatccaaggctttcccccttgcatcagtgtccccaattccaattaatgtagaaagccctttgttatggattgcaagtgattcaggcatacccgttctggtcctgtcgttataccccgaattatttctaaagctcgccatagagtcagaatttggatcctggctcgatacacaaccgcaagaggagcatacgtattcgaaagatacattatcaaaaataacagaatcacttttacaaaattcacatactaggggctttgaattctctaccttgccttctggatgcataaaactatattcaatcctttatcacttataacagttattatttatcttttttcaaataattaagtatatctatgttagtggtaattctactatgactttgagtcttcgaggaaataatgattaaataaacgattaaattattaaataataataatactagttatttaattgattgacaatcctgccttaatgatagctatgattctttggatattctttatacctaacgctgttaaattattctataggtttgtcagaaataataaacaatttatagagaaggatctaaggagaattcccaatgatccaaagattattttccaaattactactagatccgctaccaaaaccagtgtcgtaaaaagaggaattcaatctattgttgactcatgtaaatctacaaaatactggaaattcgagattttggttgtaaccgaggattctaaagatactaagactttggaatccatgccttgtaaagtactttgcgtggaaaagggcttttcacccaacgccataaagaaagccagagcactgcaattcgcgatagaatcaaggagaaaacaaaaaaaacagagttctgatcattggatttttcacatggatgatgagagttatgtagtaccgcaaaccattctctctattttaaaatttatacgggaaaagaagggaatagcaagtgagggtccaatattttatcctcttaaatttgaaaaagctaatcggattactgctttagcagaatctatgagagcttttggttgttttgaatgtgttacacatatgcataatcctcctccaattcatatgcacgggagtaatcttctcgttcgatcagatgtggaagacaagattggttgggaatttggacctatcttggctgaggatcaaagatttggatatgaattatataagaaatatggaaagaattcgatgggatggcatggaggaattctcttggaacaacctccacttgacatcaaagatcattttatgcagaggagacgttgggtgataggcaacttacaaaatatagagaatttttcaaggcttttcaaagctcgattaatatataaatgcacatctttttttcttgggtttgtatctggagtaatctctttagccttggccttttacatcaatatccctaaactaatgagtgtattttcatatgcaagttttgattggaataataacattaattttgatttgtttctttggtttgatcgaataatacatattaacagctcatataatgagatatttagaccactttttgatattcaagtttttgatagtacacttgctttgatcttgctcttttcaagtacagtttggatattgggttatcaagtagggctctttcttaatctcaagtataccagaattggacgatcgaagcgaatatctttacatgtgcagacttttttactagctccacttttgggattgttggaatcgtttcccgcgttttattcaatcatcgaatattatttctataagttaataaggcaaaataagttgaaatcgtatgatttttacgttgtaaaaaaatagttgtagatatcggtgctgaaagcctctcaggattgcaatgcttgaagtacgtattcgtgtggatatttttacaagcgaacaagcctaaaaatgtgatggaggaggtgggattcgaacccacgaacccctaaaggacgggatttcttaatttaatcttgagtcctgcgcgtttgaccaggctacgcgactcctcctttgttaaactaatgaataaaactctgtatataatcttttgatctttgaagagtaccaaattcccaattgcagataagataactgaaaatttgaatgataaaattttatattaattagaactaaacataatgaaaagatgacaatgaagattaatgaactaacgaatgatatgagacatgttacgatcgaaggaaagatcgaaaaaataagtgaacctaggacagtaaatttacgtgcaggaggctcggcactggtagctgatgccatgatatctgatgatactggcagcattaagttatcgttatgggatgatcaaataaagatggttaaagaaggtgacaaaatatcaatagaaaatgggtatactcaagcttttagaggagaaaatagtctaaacattggacgatacggaaaaattgcagttatggatgaataaagacctttttgtaaactatctttttatatttttattgaaccagtctataaaatcctttgtgtacagttttacatacgatcttttcaatcttgataattactatactcatccgaccatttgtatccaagtagggtgttagatagcttattcacagaaaatgcaggagcgcctgaaaagatggaatttcatccaaaaatcacacctcaaaaatttaatgcgctagaaaaaaaggcttaatctcaaaattcaactcatagaacacatgctacgattgagtaaataatctctaggagaaattctgataacaagacgaaatattatcatttttctcggtaataatctactcattaaattcgcttcttaaagtcgttagcaaagcgtgtatacctccgattagaaatataaaccatctaataggttaggctgatcctaccatttttactcaatctaaagcaaataacaaaccagccggaaattatatgccgatttatatgaacgtcgatctggatcctcagataattaatcccgggcttatatttagtggctttggcatcaaaatattatcgttattcctttctaatcctaacactatatttcgtttggatgtttttgagtttaaatttgtttattctttatgtcatttcaatctgatttgcaaattggtatagttgttattgcttttcttttactgctacaagatcacactataattttattttatatcataacaaaatcattttgttatgcaattattataaactcctatattttataaattgtttttcataataatgcattatcttaaatgttatactattctttttctaattattccaactcttttcttggctggcttgtctagttcagtgtcttttggggcacctgacaaaactcacattatcaccccctcaaaaaacatttgttgcaaggatgttactagtaccagttcagattccacttctactcccacttcctttgcaaacccattaaagaaaataaacacagatgagaaaaaaattatcaccccctcaaaaaacatttgttgcaaggatgttactagtaccagttcagattccacttctactcccacttcctttgcaaacccattaaagaaagtaagtactaaaccgactcagaacgatgaagcaattgaagcagagaagactgattccacttctactcccacttcctttgcaaacccattaaagaaagtaagtactaaaccgactcagaacgatgaagcaattgaagcagagaagactgattccacttctactcccacttcctttgcaaacccattaaagaaagtaagtactaaaccgactcagaacgatgaagcaattgaagcagagaagactgattccacttctactcccacttcctttgcaaacccattaaagaaagtaagtactaaaccgactcagaacgatgaagcaattgaagcagagaagactgattccacttctactcccacttcctttgcaaacccattaaagaaagtaagtactaaaccgactcagaacgatgaagcaattgaagcagagaagactgattccacttctactcccacttcctttgcaaacccattaaagaaagtaagtactaaaccgactcagaacgatgaagcaattgaagcagagaaggctgattccacttctactcccacttcctttgcaaacccattaaagaaagtaagtactaaaccgactcagaacgatgaagcaattgaagcagagaagactgattccacttctactcccacttcctttgcaaacccattaaagaaagtaagtactaaaccgactcagaacgatgaagcaattgaagcagagaaggctgattccacttctactcccacttcctttgcaaacccattaaagaaagtaagtactaaaccgactcagaacgatgaagcaattgaagcagagaagactgattccacttctactcccacttcctttgcaaacccattaaagaaaataaacacagatgagaaaaaaattatcacccactcaaaaaacatttgttgcaaggatgttactagtaccagttcagattccacttctactcccacttcctttgcaaacccattaaagaaagtaagtactaaaccgactcagaacgatgaagcaattgaagcagagaagactgattccacttctactcccacttcctttgcaaacccattaaagaaagtaagtactaaaccgactcagaacgatgaagcaattgaagcaaaacagtcgagtcatgagacctccaagaaatctagtgatgatcgaaacctttctgatttaatccagactaacctaggtaaactgattaacgcaaattcagacaagactgaggatcacgacaaagatgccaaagataccaatgataacgacaaagatgccaaagataccaatgataacgacaaagatgccaaagataccaatgataacgacaaagatgccaaagataccaatgataacgacaaagatgccaaagataccaatgataacgacaacgataggttagatgaattaaggacgatagtaagcgcagttttatcttaattcatcctaaatttattttgaattaatcaaacattctaaaatcttaaacatgttttttacctcttttgagggccctttgatgtctagcttaattccaccattaatggatatccttgccagattgaataatccacctttttctttgtattccaacccttgcaacctctcaattttttcgcaaataacatcctctgatttatttatgaatccgctttccctatataataaaatcctcttatttgtgatgaacaggtcataattcttgttggcatatttaatgtcccttcgacaaacaaatttcactttttcttcaggtaccaagaaatctttaagaggcattttagattaatttccaattagctatatattgaatgtagtctatggatttaatctgtttagtaattatattttagctacttttagacaagaacttacttggttgaaattgcaaactatgtcgatcttgcgttagcataatgaatctccattttttttcaatcccagtcgagatccctattctgatagtttgagcgaccttgaatttgtgatatcgagaaatactctcattttcctcgaaataaaagaaattatttgctgaatgatttgttgtatcaagattgttatgtttaatggtaatcttaaatgcctgcgctaatcttcctggtcctgtggtcaatttgtatatattttctgttttcctaaacaacttcattagactgattccttcaataggctctattgatcgaattagaactgctcctgccaatttatcgtgattccttgccacaatattgagacaatggtgattcccataaataaagtaaatatagagtcgtcctacttctccgaacattgaggcatttctaagggtaattctcttgtatgcatggctcgcggggtcatccgtatatccgtatgcctccgtttctgtaattatcccgctggtcttaaaataattgcccataaaatttgagtacttgactaacacctttccaatcaaggaactagctaccttggacgtatcatcctcaaaaaatgattttttgagcctcaactattgtgttaaagtaatataaggtttctatatttttttacctatggaatatagaattaaggatatctccttggcagataaaggtaaaaaaaaaattgaatgggctgaagcaaatatgcccgtattactatctctaaagaataaattcaaagaatcaaaaccactaaaggatcttgtggttggtggttgtttgcacgtaacaaaggaaacggcagttttaaccaaaacacttgcagcagcaggagccaaaatagcatggtcaggatgtaatccattaagcactaatgacgatattgccgcctcactcgtaaaagacgaagaattgtctgtttttgctagcagaggcgtatcaaccagcgagtattatgaagatatatactcggtcctgaagttcgaccctgatattacgattgatgacggtgcagatcttacaatcgaatttcataaagcatttgaaaaatacggaaagaatatcattggtgggaccgaggaaactaccacaggagtcttaagattgaaagctcttgaaaaaacatcaaaacttagttaccctatagtggctgttaatgatgctgaaactaagcatgactttgataatgtctatggtactggtcaatctgctttagatggtattattagagctacaaatgtattgatcgctggtaaatccgtagtcgttgctggatacggacatgttggaaagggaatagcaagcagggctcggggattaggagcatcggtaattgtaactgaaattgatccaataaatgccctaaaagcaaaaatggatggattcatagttgctccaatggaagaagcatcatcggttggcgatttattcattacttctacaggttgcaaagacgttataattggttctcatatagaaaaaatgaagaacggtgtgatccttgctaacgcaggacactttaatgtagagatctctattgaagaaatcaaaggtctagctaaaagttcaaagcatgtaaatgaaaatgtagaacaatttattttgaaaaatgatgcaaaaataaatgtaattggggaggggagattggtaaacctggtagcggcagagggtcatccctccgaagtaatggatatgagttttgctaaccagttcttatcagtacttaatcttgttaaaaataagggtaaatttgaaaataagatttatgagattgatagagaccaagatctgctcattgctggcctaaagttagaagcaatggggatcaacattgataaattatctgaagtacaaaataaatatctaaccgaatatggtgaggggacttgattattcgagtacattcatctactatcctgtaattgtaacgaaggcttgaagccaaaagttaattaatcttcttattttatctctagaagagcattcactgctggatgggtggtctagtctggttaggatacctgtctcacacacaggtggtcgagagttcaaatctctcctcatccatcgcgctttaagcactcattaaaaatcaggtaaagagtaacattaagatatatacaacaaaagtaattgccagaaaaatcttagttactaaaaatgatttctctagggcgtttgaataatcatcaaattggtcgtttcccattaccattacttgactctctatcttaaagacatcaaatgtcgatttttcaagagaactttttgctcttgtagccaaagatttgaatacgtccaatattttggattctggagttacatcgcctaatgtgtaataacctttgatatttctctttcctgatgtagaatgagtatcagaagtacatacttcaataatcttcaaattttctgtttcaagggagtccacaattttttccctaattccatttttcatattattagaatcgatccaacagagtgaataatctattttattgattgagatgatcaataatccaaactggccatgtcctaagtcaggttgtttcaataagtccttattggtctgttcttctatttgataactatttgcatatcctaccttgaagggaaattgttctgattctcttatctgaatcaagcattctttacctatttttatcagtacttcaatattatctggttcgattttctccccaagtgagttatgagcatcgataattaatatttgctcgaaaccaatctgtttcgcatatttttcaagttctgttttgacatcagggggtatgtcctccatcccagagggcgatttggaaaacaagattataacgtttttccccagagcaaatccgttgcaattacaatcgcccctgcgaattgtcagcggaattgagcatttgtcacctgcctctagatggttgtattgatccaacgatgttaaatatttttcaacttcttttttagaaggtatattcaaagaatgatcagagacactgtgcatgaccatagcagaatttgaataaaatttaaaaatatcgtacggcaaattgctgccgccgattggattaaatgggcctggatggagttctggtagtacaatcgaaatttccttttgattcttaggtcttaattttacaataagggtattaaccatcttgaggcttgctttagcttctgcaatcttttccatttcatcagatttattctcagtccacgcaataagaaatgcctgcaatatcttaaaagcacttgtaaaattgggtctaccaatcctgtctattactatcgtccataatacaccaatgaacaagatcactgacccaaagacgtatacagtaaagtttgtgtaaaatatatggttaaagtaaaaaaaagaaaataaaatgaaaatgatcaatggttgaataaatgaaatcggaatagatctctttaacgatgcaccgaatactgatacgaaaatacctattcttagacctatggccataaacataccttgcaaaacgaaattaatgttcaaagtattggtattaataataaattctgaaatatacccaccaattacggttaaagtccaaagcagatttgcaaatgcagctacatgtaaaactttggagaatctgtttaagggtgtaccgcgcaatgaaaggtagtcaaaaacaagtgtcactgaaaataccgaagcaataattgggaggcttattagaaaatcagctattgaatgtggggtaattacgaaattaattatagctacatttgtaattaaacttaagattgctattagaaaagaaaatctttctgatgaaggatttatgtttgtaaaaagccatcttttatgaaggctggaaacactatcagactcaaaattactcattaatagtcaaaaaaattagactggaatcaaaatttttattgctattgaaatggcaattaaagcacccgcaattcctaatataatttctggctttaccttaacccctttagtttcatcttcaaaaaaccttaaaagacccgcacttgatgcaggtaaaggtgcattcttcttcgccttcttactcatatataaaaatttgtacaatggaaataaaagcatttctgtatcaaaaaaaaatgaaacagggaatcagattctaaatcatatttaaatgacagtattttagtttaactagattgaaacgagtgcaaatcggggttataggatacaacagtgggtctcttccgattaaatcgagaactcttgatttagcctacgaagtggggagttttatagcaagaaaaaatgctatcttggtttgcgggggtttaggaggggtgatggaatactcttgtaaaggcgctaaagacaacaatggttttacaattggaatcgttccacaagaagattattcaagtgccaacaaatattgtgatgcggtaatatgcacaggtatcggattgtccagggattttatcgttgcttactcttctgatggccttatttcagtaggaggaggtgtgggtacattaattgaactttgcgttggttatatagcaaaaaaaccaatgatctcaatttctgatagtggtgggacatctgataactatgggggaaaatatttagatgaacgcaatagaatcatgattgagaaaacaaagtctccaatggacgcagtggaatacatactaaaaaaacatgagatgcgctaatggtagaattttttagcatttgatcatagtaagagtaaatgataaataataaaaaataagatcagtattggatgaaatcaccctattttatagagtacagatattgattagggtgataaaaggatccatattttgattccagttctagtaatttatttatgatttgaatgggcccaatctttttaaatacatcaaaaatgtccattttaaggcccatacccaaccgtaatgcgatgttcaaatcctcaatagtgcaaacctgattatcaatcagccatgaggcattgttggccgcgacccctaaaattgaatatggatcatattttaatgccttttccatagtaagatctatcctttcataattgtcgcccttgtattcataaaagccactcccagatttttgacccaagttttgattgtcgtacaactctttaatttttggatggggcaaaaggactgttttgtccctcagattcatttcataagaggccttatgaataacatcgaggccagtataatcggcaagttcaaaaattcccattggaaattccaatttgaatttaactgcagaatcaatcacttccttagagacatggtctctatctagtgcaaatagtgcctcatgtaccaatggtatgaaaactctattgacgataaatccggatacatccttgttacaaactactggatgtttattgatcatattgatataatttgtcacttcttgtgttacttgaatgtctgttctagttccgggaatcacttcaaccaatttcatcaattgaggggggttaaaaaaatgaacaccaatgaatttttcgggacggtctgttagactgctcaattctgttatgggtaacgtactagtatttgatgcaaaaatgacgttcttttctgccaaactgtttaactcttgatatactttcttcttcaaattaaagtcttcaggaactgcttcaattattaaatccgcattctgtattgctgtctgaaggtcgaccattggggtgatattattatagaaaatttcaacttcctctgtggacatcttatttttttctgcaagcttttgtaatgaccatctaatcttctccattgccttatccaggaatttttgttcaatgtcacgtagtacaactttataacctgccatagcagatacttgagcaattccgtgacccatgattcctgaacctaaaacagttattttttttattgacataatcagccgtaagcccgtatcaaaatataacttttgttttcttccagtttacttgatctaaaattcatctgtgattctagtttgttttgttccttttcttataattttactgcttttctttccaaccgctttgtctaccattcttacgatattattatctttagtctctttagcataaatcaaatatatccacgcactgtccttttcctcagttttcctgataactctacctattctttgggcaatctgattaatgttggaagtattcgatagaatgatggctattttgacctgaggaatatcaaaacctatttccagtgtgtggacggataataaaggataaaaatcttctccccatttttcaagaatcattttccgatcctttgtttttatttttgaatggattatctccgatctaatatttctcttttcaagagtttcctgtaacgtcttgatcgaatctatggtttcactgaaaaccattatcttttcattattgtgcttttcaattatggagactgctttttctaatttatatttggatgaattcagtaaatcctttcttaatcttacctggttaaaccattcctttgcgtacttcgagcgcattccaccctggtaaaggatctttgagataaccccaggatcatatgcatttagtttatatgatatatttctaatggattcactagtttttttgtatatatctttttcttcggttgtaaggcttacttcgatagaaactatttcgggttttgctaatctgccgtcatctacggcctccttgataagatatttttttacaggtgggattatatcaataatttccttgtactttgggtctaattcattaatggtagctgttagacctagaatctttcttttcggatcagccgtaattattttgaatagtttcttaaaagaaaaggctgtgttacttaataaatgaacctcatcgagaataactaattttgcattttcgattagaggaaaattatttattgcactttgatatgtagaaatagtaatctctttttgatcttttctctctccataatatgttcctacataatcctttgaaatgttgtatcttaaaagtctgttaacattttgttcaataaggacgatccggggaacgaggaataaaatgttaaaagaactggttaaatttttattgaattgcgtattcctcatgacctctaaacatgcccttctagcgctctcgtacgctatttccgtcttaccggtaccggttgaataaatgatggatcctcggtagccgttcttaatccatgaatcaactgccgctacttggtctggttttagcacaaagggaaatttgagtgacgatatggcgggagacatataactatttgtgtctttttttatataatccttccacaatcataattgcactaaattaaatttactaaatatcaaatagaaggtgggttttcagaattaaaggtatctttatgataaatcttggatttcaaataagaaaatttttaatcaaaattgagtgtggtttgccccttttggaatcttgaggtatccgggaaattttaatattaatttcgaaatattgtgatactttttaaatcctcatctattccagatccgagtgtcgttctcgttaagatcattaaaagtctagagaattaatagctaaggaaggcttaataagaggaattaggtatatgaagcaataatagatggctgtaatatgcaaaaaatgtggcctacctgatgatttatgtgcatgcggagagttagataaagaagatactcgaattgtagtaagattggaaaccagacgattttctaaaacaactaccatgattgagggtttggatccaaaaatcaatgacattcacacaattgttaaagagcttaaaagcaggttggcatgtggcggtacagcaaaagatggttttatccttttacagggtgatcatagggatattgtcaaaaattatttagtggtaaagggttttaacgaaggttctatagaagtaatgtagatttataaatttaagaaaagacttttgttaaatagaatatttttgaatagagttttagtatacatagatgatatactactcgttatcattatattggtaacggctttttctttttttataggaatctttttagttttttttactaacattggtggcgaagctcaatggtatagggacgttcctcttgattttttgatatttggcatctttggacttaattcaataaatttcaatttgggaatatccttcttgtttttttggactatatacttggcatgttatctgttttgttttttaaaacctgtttcaatctttcacttatcttcagtgaaaaagccatttcaaatgacaggacttgaaaggatcaaaatccagcgagataattatcttgccataactatttcttggttttcaagttattttgtgctttcaattttgattgatgtcatacaacagctgtttggtgtaactttagggaatccattaacggctaacccgttattgtcctttttttacttaactgcagccccactgaatgaagaaatattctttagggtgctccttttagggttacctttattcatattatttgtcccatttggtaaaggtttattcctctcaacgctttatcatccatacaaaaatgtttcatataaaaaaggaacatacactactatagcaatagtaataattattgcattgaattctctagcttttggattatctcatgtattattcggaggaagctatgaaatcggtaaaataactcaggctgggttagggggtgttataatagcttggctatattataggtatagcctttcttcagctttaacctttcattggatatctaattttgtattttttgcgtacagtatttttggatattttttgttcaaaagtccttggaacaccgaatctgacaatatattcctggctatagtatcagtggttttcatagtaatgggtgtcatatttttgtttaggctttccgtacaattgactaaaaaatatttgaaaaaatcaaaaatatgaattttttcacaatttcaggtgagttttgagtcctttatacctatttctgatagttacttcagtgacgccagccgcttcagccacatctttttgagttttattttctccgttcattacacaggctacatacaaggctgcagctgctaatcccatcggatcctttccagctgaaatcttgccttcttctgctttctttaggatttctaaagcttttctcttagttttttctgtaaggccggccttgcttgctattcttgcaacacattttactggatcaactactggcattttaagatccaattctctaattagcaatctataacatcttgcaacatccttcttttttatgttactggcatttgcaacatcttttaatgttctcggtgtttccgtatccctgcatgcagcataaagtgcagccgcaactagtgctgaaatagatctacctcttaccaaacccttttctagagcctttctataaacgtaagctgctttttcaatcactgcatcacctactgctaatttatcttttagcctgtctaattcactaaacgcttgtctgaaattcctgtcaacaggttcatggacttgactcctgctatcccatgttcttaatctttcgatggtgcttttcatagatgcggataaaggtttgccagaagcatccttatccactggtccaataatcgtagccaagcccatatcatgcatagccaaggaggtgggcacacctgctctacttctatcctcatgttcttctttagaaaaggctctccattcgggtccagtttcttctatcctttctgtaactacaaagccacagttaccgcaaaacatttccccagttgaattgtctgtaaccattggacccttgccacatcgtggacaccggtcaccaaacatagaaatatcttttaccaatatttatcaccataaaacttataaactaattccacatgtatttatatctttccttacatataaatatatcggaaattatcaatataaataggttagtactttgctttagttctttttctcctctctacttttgcgtattttttgctctcgcttctttttgaactgtaagcatgagttctttttgcacttttgttgctcatggatcaaaatgataagctattatttatatactatagtttttcccaaatgaaatgctagaaactaaaataatgaatttataatacattattccttcaatactttattcatgaggaatatcttacatgtgctggcttttttgactgcacttttcgctttaatcctattcacttccaataattatgccttttctcagataaatcagacaggcggatatgctgaccatgttaaattcataaggttttctaatgaaaatgtcgcataccaggaagtgagtaatggtcatcttgacagttacttttttcaaattccattacagcttgttgaatcagctaaaaagaacccaaatttagaagtgtatgagaaagagggcctttcttatggcttgttattaaatccttacgatggaaaccaaacattcaatcctctatcgatcaaagaaattcgatttgcaatgaatttcttgattgatagaaacttcattgtaaataatattttaaaggggtttagtgatcctattgtagagccctatggacccacttctccagaataccataatgtgttacccgtagtcgatcccttgaaaatccgttatgatgtagatttcgctgctaaaagtatcaaggattctatgacaaaagcgggagcagttatggaccaaacaggcaagtatgtcctaaacggaaaacccgtgctaattaagatattgattagaaatgacgatttaataagaaaatcgtttggtgattttgttgcctctgaaattgaaaaagttggatttacggtcatgaaagaatatggcgacttgacaaaagccaatagggttgtttacggatcaaacccggcagatttagaatggaatgtatacaccgaatcatacatttccagttcgttctcaaggtataatccaaccactgttagtcaaatgtatgccccttggtttggaaatatgcccgggtctcagaatccgggcttttggcaatactctaattccacaattgatgacttgactcaagatctagtttttaacaattttacatctgagacagaacgaaatagtttgttgcaacaagcggagtctgtaggtttgcaagaaggagtgcggctcttttttgcgagatcctttgatccatacatagcctcatcgaaaattaatgggctaatcaatgactattctgctggtatcgctaataaattatcattgctaaatgcaataaaacacgatatcgataattctacgctcaacataggcatgaaggaggtatatcaaggggcctggaataatgttaagggttgcacagatttttattgtaggattatttattcacttatcgccgacactccgactatttctaatccatattccggcgaccccgaaccttccaggaacaaatggacacagctgttttcaaaaggacctactgatactgtcatagttccaagcgatgccgttacttggaacccatacaatcagagttgggataaaaacaaaaatcaaagtaattctgctttaaccaaagttacgatggaacctttattttcaaaatggcataatggggtactaatggataagtacgatctgttgtactcttactattttccattcgaatggtcaactgatactaaaaacaatgataaaaccttcgatgctgagtattcaagtttaatttttccaactctgtctctaattaaggggataaagttctatgacaacagtacttttgatacctatgttgatctctggcattatgacaaaaatttggttccctcttacgggactttatggcccactgaaccttgggaaattacagctgcaactgaacgattggttactgataataaattatcctattcaaaatctgacgctaatattaaacatatagatcagttatctctgaatcttccagtgcaatctgaaatgataaaacaagagttaattaagatgtctaatgaaaaatatatccccaatcctttgaaaggtttggtaagtttggaatatactctggaacgctacaagtcgtcaatagattggatcacaatacatcacaatgcggtcattggagatgggccttattatttggaaactttcaatcctacaggaggggttgtaaccttaaaagcttctagagatgtaacatacccgttcaaaacagggatatactctgaatatgaaaaccctcctcaactaggcattgatagtttgactattccaaagttcctgaaaataggtgacccatttgattttaacttacaggtaaatgttaaaaatatatctaatggttcaaacagtttgagggggagcgttgattatttcatttctgacagaaataataagatcgtggttgaaggttcttctgtgataaatgattcctttactaatcaatctaacgataaaggtcaacttcaaactcaattggataaagctgggacagttgccatatctttgaatgcaagtcagacaaaagaattgatcccgggtcccgcaaaaataaaacttatcattacctctgcagagtcaccaaaaccactcatccaagaaaaaaccttgattgcccgtccttgagtatggttcaataaattgatacagacgagtttggcttgatgactatcatcatttatctgttaaaaaaaatttcaattttaatattagtcttaattatcacactattagtaacaatatttcttttgggttcgactatcgacaaaatcatggtagataatatccgaatgcaggtaactaattctctatcagactcgatttctgaaaatcaaagactaaaccagctacaagatccgctggaaaggcaggcaatcatcgataaacaaattagtatccaaactaaaagcttggggctagatgagccgtggtattctctaaaaaaaatcagcaatactctccttcaaatcattacattgaatctgggtaattcgagattttttactaccaatgatggttcaagcagcgtaaatgaattaatcattgaaaaactgccaaatacaattttgttgtttactacctcgtcaataactgtgatagccatagggatagtattaggatcttatctagcaaagagagaaggaaaaatttcagataaattggtggccggtcttgcgtctgccagtctaagtgtccctccatggtggttttcaatgataatgatagtcttgttttcatattttctgcaagtttttcccgcaagatctactccattcattgctccaggtactccgggatactttgttgatttgctgtatcatatgactttgccttttattacgatggttatcatagggtttgcatcatccgtttattacactaaatatattgttttgagggtaattgaagaagattacataaaaaccttaggaattattggtttgccctctagaaaaattttgctcaaacacgcattgaagaatgctagtcctcaattgatgacaatgctgggattgggacttacagcaactttgggaggttctatattaatagaagagatttttgattggcctggaatgggaaatctattttataatgcagttattcaaaatgattctcccttaattataggactggtatacttctttacactactttatttattgactagattggttctggaccttacactgtcatttttagatcccagaattagaaccggagacgaatgagctagcggatgtggtttacttaatttgactattaatatgaaagtttttctaatgaactacaagggcggtgtattgggccttgtcttgcttttgttgttgattgggatcactatctataccgttttatatattccagcaaaagaacgatcagaatggaataatccttttttttggattaactatcccaaaaacgctgcccctgcttggattaactatttcttgatgccatttcaggagcaattaccagaacatgagatatattcgaaagacgaagcagtactctcctcttattcagataccgacttcaaagtggataatcatacatttacttacgaatttatgtatggacaatttccatcgggctttagtataccatattcgttagaatttggtgaaattcctcccgcggtagaaatttcagttaagaggccagatggattggaatttgttatatattacaattccttagactctgtgccaagcgttcaaaacgatgtcagggttcaatcatcaaataccagcaaccaaaaacacgaagtgtctcaaagagtttattcctcatcaaaagaagtaactgattccttgatggaatatgcaaatttgtttaacttttccttaagtgatttgtctgcggaaaaaataattttttctgaaactgattcaaatatacctctcaaaggaacatatcagtttatatttactacttattcatttgataatgacactgttttaaaagaaatcaatcttatcatagaaggcaaggtgtttggattgatgggaacggatgaatttagacgggatattacgtttggaattatgattggaactccagtagcactaattattggagtcgcggttgcttcaacttcaacaaccattggtcttttctatggattgattgctggatataaaggggggaaaacaggaacgcttatggtaatagtgattgatatttttctttcgattccaacaatggtattatttataatattatcactgaattttggaagtagtttgttatttttgattggactttttgttttatttggctggccaggattagctttgataaatcgaacattcagtgttcaaattaagaactatccctacgttgaagcttctaaattgatgggtgaatctgactttaaagtcgtgttaagacatattatacctcagttaatcccatttaccctagccaattttgcactttcagtgccagctgcaatattggctgaagcagccttgagttttttgggatttggagacccatcttttcccacatggggtcaaatgttgcaggatgcacacttttcatctgctgaaattttaggatattggtggtggatattggcgccaggactcatgatttccatcactagtatggcatttattctgataggaagatccttggagtatagggcaaagttaagcaaaaaacaatgatttctattctaaatccttctttcaagtggtacttcgctgccttggctattgtatgcatggatatcctcctcatcatagggatgacatataataatagagattaaaccgtagaaatggttcagatcctcaagggaaggttggcttgaaccactaggatgggaatgagctgtcccaagataatttaagtcaaagggcaattcatttattggaaaccctgaatagaatggtccatgtaccgagaaaggagggattaccaaattgtttatcaatatctctgttttttttctttcaccgcctaagattagtatcccctcatagggatgatgcattttagcataggaaattaatccattaataacattctgggtgattgctacaattttctttttgcttttatttcgatccgggggcttattttttttaccaccaagaaacccaaaatccataccagattttagaacttactaacataaaaataatatttggatttatttaaaatcgtaactacgtaatctttatgtgaaaatcgttaactgaatttttatgttattttaaacctgttgataaaataacaagcttttaatatttttagaaagcattatttttagtttgatttatcaggtttccatcgtgcttattttttctacctttgtatttcttggtgggctgttctcaggcgccaccgcccaaattcttccacaaaacaacaatcaaaattcagattctacatctattactgctccttcaccttctccatctttgcttaagaacccttacgggatcagaattacacatcccacaagtggtgatcaggttcttatcaacggcactgattactttgatattacgggaaaaagactttctgttgaaggtttttctatatcaaacaacgggaatctaactaattgcgatgtttctatagtgtctaatagcatctttccctaccaaagtgtaaatgggactggtccgcttggtgtaaaggacttttccaaatggaactacaaattcaattccaactacgcaaactttcatgagggttcaaacaaaatcacttcaaaattagcttgtgaaggaggtgctgcaaaggcatattatagtgtcaacgtaacaggaacaagatttaatgggacatttcctacatcctcgtcaaatttagctttagctagcggaaatattacaggtacatctcagaataatttaagttctggtgctacagactcggctactgaagattcagcatttcccgtgactgggatcgaaatagaatctccttctaatggtgaaacaattaatattgataaacctataaatattaacggtagttcggagtatccgaacaattatgattgtgaagtacttttagctgatggtaatactgcgggagtaattgcaccaactagcgctaaccaatctaattttaagaaaacaataccaggaggcattaatggcacaagtgattatagaagttggagtgtcgtgcttgaacctggatcaaataacctcaagaatggctcacagtctttaactgcaaaattgcaatgctattccccactatcttccgtgaaatttgcaaaagtaaatattgttactaatacatcgaagccgctagagctcaaaacaatggatgtcagtattgacaaaaccggacaaggtacaaaccaaaaaattgtcattggggtaaatgacgctattacaaatgatcctttgacagatagtgctattacaggttcaattaacgacaattcgttctctggcactacagactcgctgggaaaatacagtacaactataccgactagtgttatagattctggtgcgaccattgacgtatccgttttagcttctgttgatggatataagattaaaaagacgagtactacttttgaagggtcacctaaggtaacggatgaaacaactccacccacttccgatactgataatcgagatataccaaataacgaagaggatcttgcagataaaatattcgatgatgtgcaaaagcaactaagtgagcagggtattaatattcctcttccatttggatagaatgtaccctggttagttcattgtaaattacttagatttggctagctacggcatcaataattacattggctataagatgcatagtgttttttagaattttttaatccatttattcttctaattagatttgcaattaagaaataacaaggttattattctatatcttttaagttatcttgaatttagatttatgactgacaatgtgtacaaatttttgattcttgagttaggcattgctattgtagatgaaaagaatcaaacccaatcttttaagaaattttatgatcctatagtatcccacctgaaaattaagaatagggactatgaagaaatttcggaaagcttggagttttttaaagttaaacctgaattattgcaaacaaattatccggagttaatagattatttgaaaaataatacttttaatgctgaaaaaattcctgacggcgatgaaaaacaattgcagattggtaagatccgtttatatacacagatgtatggttctaattcacaggaccattcagaaatagtgagtaatatatcaggtgagataagagagtttgcacttaaatggtcttctataagagttcaggaagcctccgagcaattggatttacatattagtcaatccatcaatgcattagatgaaatagacaagatattaaatacagttggaactcgaatgagagaatggtatggacttcacttccctgaattggataacctactccaaaatattacaacttatgcaaatattgtatccaaagttggcaagcgggatgaaataacagtagaattcttacaaaccctggacataccggaaaatagaattgagatcattcgaatgacagcgaatagaagtaaagggggcaaaattacagaagataatttactaatattacagagtctcgctaatgaggttatttctttagggcaaattagaaagacaatagaggaccatattgatatatccatggaaatgatatcaccaaatttgaaggaattactaactgctactgttggagcacgcttaatcgccaaagcaggcagcttgaaaagactagcttcattgtcatctagcacgatccagattcttggtgctgagaaggcgctatttagaactttgaaaactggtgctaatcccccaaagcatggtttactctttcagcaccctgttattcattcggcaccaaaatggcagaggggaaaattggcaagggctatctcctcaaaagctgcaattgctgccagagttgatctttatagtcggaatccagaatcgagcaatgcattggcaagtaagttgaacgataggataacagaaattcaagaaaagtataaagaaccttccgaaattcagcaaaaacaacaacaacaaaattttaagcgaggtgatagggattcatatactagaaataaaggaaagaaatacgggagagatagagatagagatggggataaagattttaaattcaagaagaataaattcaaaaaaagattccataaatcaaataaaaaataatggattgtgtttgcaaaagaaggcgtgttaaatgaatcaattaactttgtataaatcatacgacaatggatcttttgttattttggtagaccaggcgaaggaaaaatatttggcaacccaaaatctagacacaggaaaaagcgtttatggagaaaaaataataaaaattgacgatctcgaatatagaatttgggaaccttacagaagtaaattagccggagcattatttaagaatcttaaggataatccaattaaggaatcttcttcagtgctctatttgggagcctcaaccggaacgaccgtaagtcatgtatcagatatagtgggaaataagggattgatatttgctgtcgaaccatctgttcgcgttgcgagagaatttttggaaaatgttgcctctagaagaaaaaatattattcctattttaatggatgcaagaagatttttacattattattcgtattttggactggtgaatgtagtgtactcagatattgcacaaccagatcaaactgatatagcaatcaataattgcaaatgttacctaaagcccggaggcgatttgataatagtcatcaagactagaagtatagatgtattgacagatcctaagttggtaactcaaaacgaagctaagaaacttgagaataatcaatttcagattttgcagattattaatctagagccttttgataaggatcattcattaattcatgccaaatttttaggctagatagtataataagtcaaactttttattagaaaagctttgtttgagcacattcgtttatcatgttcttaacaggactccacgagaatctaatgtattttttattttcgttatcaaaaagatgatttctcaggaataattttgttgacggatcagagggatatcctgagcctatttttttacacaaggtctcctctattttcttaatctctctatccctagttaccttggcaattatagatgcagcagagactatcaaattgtctgtgtcggccttgtgaaaacaatatatcttgactgacttgcttgtcaaattttttaatatcgactgtttgaaccgatcggggtttacatcacatgcatcaataataattttgtcagcccttaaattgtctgcgatgatcgtcataaatcttgattctagaacgttcaattttttgtggttcacgtaattatcaatggttataggattaattctacatacgaaaacagaaacagctgatttcaaaatcttggtatacaaagtttcccttttttgtattgaaagttttttagaatctgtaatgccctcgttcctaatactttctaatcccgttgggtcgaacgagatacctgcgatcactaggggaccaatcacagaacctcgcccggcttcatcaattccgcctaacaacaatcctatctattcttgttgaattcactaatcctatattaatgaaaaactcgattactctgataaatgagctagtttaccgcgtcaaaaaaaggaaaatgaccatagattggctactgatttctaccctcattcaagttatttataataatccagattctgtttcccctgcttgaaatctgcatgtgataaactagattctaatcttttggctttgatagtttgcagaaaaaagaagccacatgaactttttgaaaggatgaaatgtaggaacatagtgctaatccgaggaataaatttgatttaaaaaatgtttgattcaagtaaacaagaaaatcctatatttaactttttgaatcttcaataatttaatccttgttgaggtagatacttttcaattttataaaaaatttacaacaaaaaaattcaattcccctaaaaattgagtctagttcaacaagaaacaatttaatgcgattgtgcagtcactcgatctcttgcgtaattaatccaaacatcttttatgaaaagatgtgtgaatatatcgcaatttctctaaattattttaaagagatacaagaaggatcatcctgttattccaaaagatattattaatacatttgatctaggatcctggactgagagtacaaaaagactatccaaagcaaaagttcctctttaccggtaagaaagaaagaaaagaatcaaaaggatctaacagaagaggaaaaggaatacaacaaagatctctaaaagaaggataattgtagtcgaacataccatctgcaggataatgaatgatgtgtttaggaatagattaagaaagtacgataagacatcggacatagtattaggactggtaaactataggatgatgaattcgttaggctagttggatgataatggataggagacggagctagccagttttaattacgcgagagattgagtgtcttatgcaaggaaattcaaatatgatattatttttttcataggttgagattaagattgaataaatatggggtggacctccgtttattatttggaaagaatgaaaaccacatatgactggtcgaagatcaaagaaggggaggtcacactcttggttccaacacaagccttaacccaaaaggagcctcctaaatttcctgcattctttaacccagctgcaaaatttaacagagatatttctattctgatataccgacattacattgatcagtcaaggaagaatatttcctttgttgattccatgtgtgggttgggggcaagaggtataagagtcgcgaaagaaattcctcaaattcagaaggtggtttttaatgattttgatatgctatctgcccaaactgcgaaagttaatgccgtgataaacaatgtataccacaagtctgatttttatacatccgagatttgtagtttcctatcggctagtgccaattttggtaatcgcgcgaccataattgatttggatcctttcggaacacctgcaccttatttggattgcatcttgcgtggggttgaaaatgacggtatgatctcaattaccgcaaccgataccgcggtactgcagggtgtttatccaagagtctgttatagaaaatattatggaataccgttgagaactgggtattctttggaaatcggcacaagattgttactatcctgtactgccttagttgcttctaggcttgatctatacattaatccaatatttgcacactcatacagaaattatatacgaatttattgcaaagtatcaaaaagcaattatttggcgaataaaataactgataaattagggtatatacttcattgtttcgaatgcggatatagaggattgatgaaaaaaactccatttgtcattgattgtccgttgtgtcagaaaaagatgaggatgagtgggccgttatgggtatctcatatattcgataagaatgtgattttcaaaatactagctgaagtacttggatcggaagcaagaatgatgcagaaatcaaatgtaaaacaaagtaagaatcctatcaagaggtttttcgagattgcatccaaagaattagatcatatcccgtatcattacaatagtgacgaatttggaaaaattatgaagaatagtacttatcccctttctaaaattgttagtaaattaatcttggatgggtataacaccaccccgaccattttttcaccgacagggtttaagtcagaagcaagtataggagaaatcaagtctagtctttctaaactttagtaaacttgcagcttttgggttgatcgatgtctacaatgtaatccttaagatagtaatgctctctattcaagaatttgtgcaaatattcataaacttatcaatgtaatttccgaatttggaactattgcggattttgaatatttaccatttctttcaattactagcttgtatccatccttgattctttgcagcgatttaaatcccaatttgtcagaataaattcgaggaagacttgaaatcaaaaaaatctcatatttttcccttaacatttttagaaaattaatgtgctccaaatcttttgaatattgatatttattcagtccaactaaatccagtctgttttcaatgagtttaagcaatgtcccattacccactccccaccgattttctgctaataatattattatgccattgtcactcactacgtggtaattattccacaaaaggtttaaactatttccaagcgtcatttggcaggaatagttagtgttaccagaaatgaatgcggattttgaagtttcagaggttaattgtgttattgacttaaatctttcaatggcttggttaaaagaatttgaaaggtctcctatgaaaatcgagtcaattccttcattattagaaattacgtgtattgactgagaagcaactttagatgtaacttctatagccaacttaagaggttcactgtatttaccaggttgaggtaacgaatcaaatatgaacgcgtagacttggttcatttcatctggatagcattccctcaatagtctgactggggacccagtataaccaaagaccggatcatattcgatcctgtctatcaagatggtgttattaaatttgtttattttctccaatacttcctcgctggcaagtctaccaatgctaatgccattttcattaagctgttgttttgctctttggggaatggattttgaaagtatacagtactcaatattttcaattttcagttctttggacatgttttggataagtgtcaatattggtagcatgaagaagaatgggctcgtaatcagaatcagagttgactcttgaatcactatcttgttttgtatttcattttctaatttcttcaaatctaacttattcatcgaaggtctaagtatgtgagaaatattctcatatttgatatctaatataatttctgaatcgccataacctaaccatatttccggcataatagaatatttagcagtgagtaacatataaaatcaaagattatctaattaggagcagttgaacgaaaatgataaattacagatggaggaggatctcatactctttttattcgatagaaatgccatcaagattggagattttacactatcaagtggtagaaagagccatttttatttggatttgcgaattctgcagagttatccattgtatttcagaaagaccatatccttactgaaagaccttatctactcacaaattggctttgagagttttgattatatttgctctgtgccaacttcaggaaccatctttggctcagctctttcttacgaactctttaaacctcatatttacgtgaggaaggatcttaagagctatggtactcagaaaaaaatagaaggagcattagaaccaaattcaaaaatattatttgtggatgatgtaattacaaccggacaatctatattatcgggaatagaatcattgcccaatcatgcagttttgggtggagtagttgttctggtcgatagaaatcaagggtctcaagatttgtttaatcagtttggattaaagataaaaagtgtaatcccaatcttccggattatcaaaatcttgaatgataacgctaggattgataagaacgaatactttaaaattaaagaggagatcgcagattcttaactttcgtatatcattaaattcttttcttccaaaagggtatgcaagttggtaactgccctatatacttcagtttctttttttgcaccggtgcaaacaagcttaccacttgcaaataacaaaattacggtttttggatctaacatcctatggatcaatcctggaaattgctcgggctcgtacatacttcttggcaatattctggctgctagctccaaatggattttacctcctaaacttgctgaagcgacaatattctgaatttcaataattggatcattttccacaggaattccacccttacgtaacttttgaacaacacttcttactgccttaatggcttgctcttctgattttgccccggtacaaaccatcttccctgaactaaaaattaacgtagcagttttgggggcttttaatctaaaaactagtcctggaaattgatctggatgatattctacatcgggaaatatctgtgtaatcaagtttaaatttatagtttgattgaccgttgcagatgccacaacgttttctatacttaccattggttttgtttggggcataattcgtttccttgggggtatataaatactcgatataaatatacctttatgtgatattgtcaagtttgatcaataccaatcttttttattttcttcaagaaaatatttcactatttttaaaaataactaaaataaaaataattattgatatgaaaattaaaataaatctattaaagtaatctttacgtgtaattattatatataaataaacaaccttgatttttaccctcctattattcaaaaagatataaaaaaatgatcaagatggttaatcgaaacctgaatttcttgcattatacattttaaataccgatttcaaaaatgaataatatgtctcaaaaaactagaattgatagggattcattgggtgaagtggccgtcccagaaaatgcatattatggtccattcactacaagagcaaaggaacaatatcaaataacaaaactccaaccacataggaactttgtaaaggcattcattatgatcaagaaagcggctgctgtaacaaaccgagaccttggcgtgttgtcgtctcaaattgccaatgcaataataagtagctgtgatgaaattttggcagggaaattatctgatcaatttgtaatcgagacccttaattcgggagcaagcacagcttttaatatgaattgtaatgaggtaattgcaaaccgggcactagagatccttggcaaaccaaagggttcttacgaaataatcagtccaaacgaccatgtgaatatgtcccagtcgagtaacgatacctctcctacagccattcatatttctataatcatgaattgtcaagagttactaaaatcattggacctattgatccattccatagaaaaaaaggcaattgactttaaagatgatataaaaattggtagaactcacttgatggatgcaatcccagtcaccatgggggacgaatttagttcatacctgtttgcactaataaaatcaaaagaatttatcagcagatctttggaacaactctactatgtcgcccttggaggcacagccgtaggaacgggcgcaaatacaccaaaaggttatcaaccccttgtggttgaaaatttagccaatatttctgaactgccattaaagccgtcgcctaacttattctattctctacaaagtaagcttgatgtagcgaattgttcctctgcgataaaaaattttgccatcgaattgacaaaaatgtcaaacgattttaggttgatggcttcaggccctatggcgggatttgcggaaatcactattccagctgttcatgcagggtcctcaataatgccaggaaaagtcaatccttctctttctgaaacgctgaatatgatttgttttatagtaattggaaatgatctttcagtcaccatggcatctcaggcgggacagtttgaattaaacgtcatgcttggagggatggttaagtcagtgttagattccacagacatgctcactaattttctacctatattttctaagaatatggttgatggaatacaatcaaacaaacagaaacttcaattaagtgtccagaagagccctgtgttggtaacattattgaatccaataataggctatcttaaagcagctgaagtttacaaggaagcaatgtcaagcaacaaaaccattaaagatgtaataattgagagaaaattaatgagtgaggaggaattcgataaggcattatccaaggaaagacttttaacatgatcaattcccgctgtcttatttcttaattgaagcgtgaaattcacaaatatcacaatgcttgaattgttcaccatccagatgattgaagtgtactccgcaggtcatacatgtatgatgagaatcctcatatccatcagaagccacaaaattgttactagttaagcttgggcttttgcaatttatacatctgcaattgcattccatatatattttcaagaatctcatcataaaaaatgtattgtttaaattatgcagactctaagtacaccgatacaattgaagaaaattattcccccttggttttcatttctatttctaatcttaatgttgttatcttcagtagcctataaagaaattgaaaatgtcctagctcaagagcaaaaacaaaatcaaacatctttggtgacggtaggaggtgttaatttaataactagtctttctacgactcctgatgctcagtctaagggattggcaattagagattccctcaatgaaaacgaaggaatgctattcatatttgagactccacaaaaatactctttttggatgaaagacatgaaatttccgatagacattatttggattaaccaagatggcaagatcgttcacatagaaaaaaatcttcctccctgtatcttcttgcttccgtgtccgtcctatgcaccaaatgacgattcattgtatgtattagaagttgtctccaattttacaaacaaatttgacataaatgtcggtgactcggtcgactctaaagtcataaaataaggtcatcgttagaattttaatgctaggatttgaaactgtcaacgagcttcttgtggtagctacagagacactgaaatcctaaatcttggccatttggtatgacttgaattttttttaattgctttacagaataaattgattttagaaaattaaagcaagtttcacagacatacatatctaaacaatatggcagtgggcaattaatttgttattttagtttgatgatttatgaaaaagctagaggtttattgttatatttgtgcatattaatggatttgtatcaattatcagccgccatcgagaaacccattctactgggaaataattatagagaataagattgtcatctattctaagtcatctattaatcgttattctttggccatctcaatttacataatcatcatcataattctgctgtcaatgtaatgagcatttttgtctaaaggatcggttctaaatccaactttaagaattacaacgaaaacatttttttcttggctcgccacatttaggcaaatacttgtcaaatctcaataattttccagtacagtaatttactaagagcgcaatagaaattcttattgttgatgttattgggcgctgctaacttaggcgtctggcacctccttgttgtgtatttttacaaatagattcaaccagtttttgacatggtctagtttacacttctctttactacatggaaagtaatcgtcaaatccttcagttcgatccttgatgtactgcatagttctttcaatcagacttttctcaaacgaagaattgatatggtgttttagttttaggaatctacaagccattgggtaccaggttccaccgtctgttgatacgacatgttttccgtgaatcttgatcagacctgaaataaatctctctgcgataagcatgttcctctccttggatttattagctaagaaagagtgcgagaatttgcctattttctggttcgattgctgcccataaccaggagtattctgagccgacttttattaatgtctcatcaatgaggtattctgatatttttgttcttcttgttgaaacctttcgaggtttatacctttgaatccaattccaaattgcaacgtgacttctattgataatatgtaaaaaggacaatgccttggcagtatttctaagcgataagcctagaaagtacaaatacagaccatagtaaatatgctctgaagatgttttatttcttttacttaacataacagaaatagagcgtctttaagctaaagatttatcgttaagttaacagggcctgttattgtatgttaacacttaaaaataggtagcattgtaaaagaagatatcatggctgcccgcaaaagtacaaccagaaaaataagactattgaaaaaaattaaacaaaatagaccggtgccagcctggattattattcggacacaccgacatgttagaacaaatccaaaaagaaggtcatggcgcagatcagatgtgaatataggataaaaagggggataatgtaaaatgtcaacagttgaggatacactcgcaagaatatatacaataaatttcagtaaagcatggttaacaccaaagcataagagaacagatagagtagttaacatgattaaagaatttgctataaaacatatgaaaagctcacaaattaaaattgatcaagagctgaatcgatacatttgggaaagaggcaaaactaatcccccacgaaaggtgagggttagaatagtgaaagatgaagacgatcaggttatagtttctctatatgaggatattgtcatcgaatcagattctcaacctaaaattgaaacatcagaaaaggtcgaagtggaagatgataatgttgcaattgaagagagtggaccggaaaaaaagaaataacaatgtcataatttaatcttgaattatattcaaataattttttatttttagaatcaacaacaaattcagaaataaaactctgattgtggttttatagttttatatttattttatatctttttaaagtatcaatatcaattattggatcttttgttaactaaagcagatcctgattcgatatctttgaaataaggtaattgaatatcatccattgctatttcaggttcaaaatctaaaatatttttcttcggaattaaaaagttcaggggatcgtatcctgatatgatatctttatttgttttcaccaagatatgacatttgggagtatcatttcctccttctagtatgtttacttctcgttcagcttccgaaagtatattattggctgtctctattacatttttcattactgaaattttttcagtaggctgatataaatagagagagcatttttgtatgctactaatatcgattttttgtgtcagttgagccattgtttctacaaaggcattctttataccctttgtagatttactagacgcaacataatttaatttttctggaaaactcttgatcactgattgaactattatatcgactattgctgtatttgtaatcttgtagcattgttcaatggaaatatcgttatcgttccttattattgcattgttatcaattactattatactattaacgaatttacataagaaagaaagagatactccacaacgaaataacttttctttctcaaatccaaagggtagtatagttaagcaaattatctctctatttatattgttctttagcatttgagataaaactggcaatactgctgagccaaacttggaagccaagttccctacaatgataatagattgggattggttaacctttgataaaatatcttctgtcgcttccgataatgcttttctaatttgatccagagatggattaattctggacggaatagctatttcaattttattatcaaaatctagtccggtcgaggaatgattctccaaaagaagataatctaaatttactttattcaatacttcaattgttatatttatccctgcattcccaacaccgataatacacgtattcaaactattagcattcttcaatcgtcattaacaaaccttagtcgatagataaaagtgttgtgagaccacttatgagcgtaggctacaccggtattgcgtttaagacatgatttgaacaggctattactctgactctgacccttttgcctatgaaagggttgtcaaaacataatatactattcttataaggaccagttttgataaccatattttcttccttttgatccgtatatttgtgatagacctttgattcttctattcttgaattataattggtttggttctttcctttcaaaaatgcctcatcaggatcacgttctagaattattgatttgtaataatcatttctccccttcaattttccgttttcaatttcgttaatgaggatctctccttcccaattaatccacttggaatttctcctttttgctattcccttgattaaattatgcagcctttctgatctaactgaaattatgtcgtcatcgaccttttttaatttcgaagcggcagttccgggcctagaactgaatttcgatgaattaacaatatcgggatctataaatgatattaaatctaaagtctgttcaaaatcttcattggtctctgaggggaatccggtaataatgtctgttgcaattgtgatttctggaatcttgtctttcaatttcgtgataaggtctttggttgtattaatcgtgtgtcctcttttcattttccttaagattctttcactaccgctctggatggggatgtggatgaatttaaaaagcttttcactttctgaataaaacgtcgatagatcctttatcattctggtcagatacattgggttcatcattccaagtcttatcttaaattcttggtttattttttcgcagctccttaacaaatttattatgttagtcccaatgtccaatccataacatccattgtccgtggatgtaagccaaatctctttactcccatgttctaaatcttctcttatttgtttaactatctggccaattctataactccttagattacccttcgcaagctttgtttgacaaaaggtacattcgcttagacaaccagttgagatttcaacgatactaattataggactgatctggaacttgggcatatttattttttctatatttgaatccactaggcttgatacagtttgtccacccaacgccgcatgagcgacctcgactaccttatcaatggaatttggtccaattaagcttgcgtggctattagcagattttactaaactctcatcagctgccggcaagcagccagcaataatcaatggtttattagtattagtcaaatatttaatccgatgaatcattttatgttcagtagaattttttaccgagcatgttactatcaaattaatactagagttctctggattctccgccaacctgaatccccgtagttttagctgtcccgccatcatttctaaatcagcaaaattggctgagcaaccataaccttcgatccagaagctgggtctttgttgatactcatcatttttgggttcatcatctgttctatatccagcatttttcctaattctttttttagaaggtatttctgttctttttaagagtttaatatggtcaattaattgtggctttaaagaaatgaaaattgatgagccatctattgttctgtgggttgtaatagatctcaatctcacttcttggttgaatcgaattgagaaatataccttttccttaacaacctgctagaaccttgtgcgttgtgattagttaatatatatctctccagaccgaaaacgtactttagtcatgaatattcttaataattgctatgtagtgacgaaacaaatctttatcattgcgtatatgacaggattcctttggttaagaaggaatcctctgtcattaatattcacggccatttctccattttcattgttgttcatattatttgtagtaagtagtggtgaatacgtacagtttgccgttgctggcagtctggttatggcgctagtaggctacggattggctttaggtcaagatatttcattttacaaaattgaatataaaatgcaagacgtatttgttgcctctccagtttcttccataacttatatgctgggattggctttgtcacaattactatatgggctacctgcactgctggttttgctctcacttgccgtatatttttcagtttctttaaatttcattcctttgttattattaaatgtctttctcatttgggggactatgtcttccataggatttttcttgtcttctcacatgctgcatatgcgaaatgccactcagctaatttctttcgtaaacgttattattgctattttacctccagttttttattcaatagaaaaattgcccttagatttacaattcatatcatattttgttcccaccactcatgcctcattgatgttgcaatattcaatgggttttccagtacctccgggttggaccatctcattaggattatttgtccaaattgcatactttgctttttttatattggtggcaaagaaaaaggccttgtggagagaaaattaggggacaatgggtgaaatgtatgctaaaactcttgctttagtccaattattgtttattctgttcaaatattcttctagtggaatcgaccaatttaactacatctttcttatcatttgcgtttgaaaaagctcccatcttccctggcaagaaaaatatatcatgtttagccattagtgccagattataattaattaatatctccctatcgcttagtgctgcatcaacagcattgtctatcctctctgtcttttcattcaggaaatgaaccatgaataatgaaccaattcctgtaacttggactcttattccaagctcaacgaataattttgtcaattcgcttcttgcagtttctccaagaccattgattctctcatagattcctggattttttcttagctctttcaaagtatgatatccagccttcatagtcaatgggtttgctgaaaatgtacctcccccaatcgaacagtatgaagatttattattgtccacagttgcgtctgccaatttcattatttctttcttcccacagacagctccaatgggaagtcctccgccaataattttgcccaatgtaaaaaggtcagggtctaatttgaatatgttcatcgcaccatcaaaggcaaatctgaatccagtaactatttcgtctagtatgaagaggctttcgttccttttagcaaactcttgtagtccgagtagatacccgtcctgaggaggaatgcatcctgctccacccagaatcggttcgacaataatcgctgcaaggtcatccttaatagactctaacaccttgatggatctttctaaatcgttaaattgtaatgattcaataaagtgaccctcatcttcaattagtcccataccttcatccgcctcataaggataattcacagattgcaagaggtttgtattaaaaccatgccatccaccctctactttggcaatcactcttttacccgtcgcagccctggctaaacgaattgcatacatggtcgcttctgagccagtactacagaatcttaaattctccgccaggggtatggccttatgaatttcattacctagtttccaacttgctttatttgcagtcccatagagagtacctttaccaacttgcttctttaatttcgatgtcacgatctccggagaatgtccaaggatgagagcccagtgaccattccaaaaatccaaatacctgtttccatcaatgtcaaataaatatttaccacgtgacttgatggtaaaaaaaggataaggtttaaagtatcgaatattatgatttattcccccgggaaaaatgtctctggatttgaaatacaaattcatggattcaaatgtcttactcttatacaaatccgcatagtcttcatatttcatatgtaatttattgtcccttctcagaatcttttatatgtttttaaattttagattgagataataaattattcaaagatattctagaaggattattttattcagtaatctattttatattcgatcaaaatttaatgaaaatcagagtaccttttgccgtgtccagaattaattgacttattagcaaaataaatatcattattattgttaatctaagaacaagatttatattaatatttttttgattgtaaatagaacgtatccaagataaaaggcggagtcggtaatgaatttggcagatgccacaatgtgatttataaacttccagctgcgctcataccattgtaaagctacaaaatgaaaaaatagggggattcgatcaaaaaatcagtgctgacctgatggattgaatctgacatgggaatgatcagatagactagaaatttatattacgatactaataaaagttaacagtatgttttagttaagattttgatcaactgctaaattatggattctcataattatgggtttgaatcagaagcatagaagacgttttgttaagttaatgttatgtaccttggagtattattattttacgtaatagaaaattcacttgtattttgcataaaaacaacatacaaatctagtttttcgatcgtactctttctctttattgttaatctgaaatagaataacaataaagaaagaaactcaataaacgtcctttcaatttttcgatctattctttcctgagatggggaagaagataacagaagaggagaaatggacgatatttatatataaaataaacaaacaacccctaaaaaaagttagtttgtttatgtgagaatcaaccgacgatttataataaagtaaataataattctacagccattatttactttatttgactccggttgatcctgccggacccgactgctatcagagtgggactaagccatgcgagtcaacatagcaatatgtggcatacggctcagtaacacgtagtcaacatgcccaggggacgtggataacctcgggaaactgaggataaaccgcgataggtcatcacttctggaatgggtaatgacttaaatctatatggcccctggattggactgcggccgatcaggctgttggtgaggtaatggcccaccaaacctgtaaccggtacgggctctgagaggaggagcccggagatgggcactgagacaagggcccaggccctatggggcgcagcaggcgcgaaacctctgcaataggcgaaagcttgacagggttactctgagtgatttccgttaaggagatcttttggcacctctaaaaatggtgcagaataaggggtgggcaagtctggtgtcagccgccgcggtaataccagcaccccgagtggtcgggacgtttattgggcctaaagcatccgtagccggttctacaagtcttccgttaaatccacctgcttaacagatgggctgcggaagatactatagagctaggaggcgggagaggcaagcggtactcgatgggtaggggtaaaatccgttgatccattgaagaccaccagtggcgaaggcggcttgccagaacgcgctcgacggtgagggatgaaagctgggggagcaaaccggattagatacccgggtagtcccagctgtaaacgatgcagactcggtgatgagttggcttattgctaactcagtgccgcagggaagccgttaagtttgccgcctggggagtacggtcgcaagactgaaacttaaaggaattggcgggggagcaccacaaggggtgaagcctgcggttcaattggagtcaacgccggaaatcttaccgggggcgacagcagagtgaaggtcaagctgaagactttaccagacaagctgagaggaggtgcatggccgtcgccagctcgtgccgtgaggtgtcctgttaagtcaggtaacgagcgagatccctgcctctagttgctaccattattctcaggagtagtggagctaattagagggaccgccgtcgctgagacggaggaaggtgggggctacggcaggtcagtatgccccgaaaccctcgggccacacgcgggctgcaatggtaaggacaatgagtttcgattccgaaaggaggaggcaatctctaaaccttaccacagttatgattgagggctgaaactcgccctcatgaatatggaatccctagtaaccgcgtgtcactatcgcgcggtgaatacgtccctgctccttgcacacaccgcccgtcgcttcatcgaagttggttcttggcgaggtggtgcctaattggtactatcgaacctggggtcagcaacgagggagaagtcgtaacaaggtggccgtaggggaacctgcggccggatcacctccttagatattatattgtagtagtggtagtgggttagaaagggccttgtgctctttctaatctgcgagactttacaataattatactaataaaataaaatccctaaatctatctaccaaccaaccaaccaaccaaccaaccaaccaaccaaccaaccaaccaaccaatcaatcaatcaatcaatcaatcaatcaatcaatcaatcaatcaatcaatcaatcaatcaatcaatcaatcaatcaatcaatcaatcaatcaatcaatcaatcaatcaatcaatcaatcaatcaatcaatcctactatacacacttatctgtcctgtcctgtcctgtcctgtcctgtcctgtcctgtcctgtcctgtcctgtcctgtcctgtcctgtccattacgaatggacgattataagatagtatagcagtagagtagggtggtagataaagaagggagtgcaatcaaatcaaaactgatcaatcaattccttcatttttcatacggtttgaaaaactgattagtatgttgtatttttatacaaattgatataaagacaaagattagaaagagagcccgttaataaagcacaccagtatgaccttaaccaaatgcaattacgtctatgcaaattcttcatcggccttattcttttagaaattagaatagcgttgaaaattagaacgttagaatataatcagtctatctgatcattccaattaaaatcagcatagtatcggatgcaattctttgtctcgtaaatgaggagtagaagataaagaatgaagttgatgtagtaaatgtgagtttacaatgatcatcatgtaaaggaaaactccaattgaataaggatatcaacaacatgtagtaacacattatcgcggatttcaaaatagattatattcgcgtaataacaatgcagtcataataataaacaaaatttcagttgattgttatagtgcaatatgtgtgttatagttgtaggtaaacagcaaataatctttcatacatacgaaataccaataccaaccaaattgaattagacttttctaccacaagtggaactaactaactaactaactaactagataactaataacaaacaaaagatccaaaggacaaagaaagaaactccaaataaaaaagtaattaattaattaattaatttattaattaatttataactactggactggtgcaaagacgccgattggtggatgactcggcttgataagcgatgaaggacgtggcaagctgcgataagcctgggttaggtgcatgcgaccgacgaccccgggatttccgaatgaggtctctctatacactcccatgctttagctagggagagcaaaccgtccgaagtgaagcatctgagtaggacgaggaagagaaatcaattgagattccgttagtagcggcgagcgaaagcggaatagcccaaactgaatctgttatggtaacatgatagagatgtggtgttacgggtatgacgtataggatcctgtaatcgaagccaaagtgtactggaaagtaccggaatagagggtgatacccccgtaggcgaatgagagcaggattctgtcatattcagagtaactggccttggcagtggccagtgaagatgggtgaaagtagcatccaaggctaaatattcatcaagaccgatagaatactagtaccgtgagggaaagttgaaaagtaccccggaaggggggttaaaagcgcctgaaaccaatcggttacagacgtgtatggctcgaaaggatttctagagtcatacgttccgtctagaaacacgggccagggagattgctgtcatggcaagcttaacctttaacagagggaaggcgaagggaaaccgaatttgcgcattttttcatttgaaaaaagaggcaatggatctgaaagggtcttgagtcatggcagtaaggctagaaaccggacgatctagtcctggataagacgaaggtgagcgaaagctcgctggaggtctgcaagggtcctgacgtgcaaatcggtcccctgatctgggattaggggtcaaaaaccaatctagtccggtgatcgctagttcccaccgaagtggatcgcagtcctgccttagctgagattgcttgtactgtagagcaccgatcgggcggtaagggctcgaaagagctcgccatccattcgaactccgaatgtgcaagcgtcgtagaagctaggaggcgggtttatgtggggtaagcctcataaccgagagggggacaacccagactaaagttaaggtccccaaatgtctactaagtgtcaaaccaaagggtgttttcgagcaaagacagcaggaaggtaggctcagaagcagccatccttcaaagagtgcgtaacagctcacctgccgagctcgaaagccccgaaaatgtacggggctcaagtagactaccgatactttagaccaccgacgatgtcggtgcgtggtaggtgggcgtagtgtttgggtagaagctgggctgtaaagtccagtggaccgaactactagtgcagatcctggtggtagtaacagcatagccgagtgagaatctcggcgaccgcatgggcaagggtttcccggcaatgcgtcatcagccgggagttagccggtcctaaaaacaacctcaacagaattgtttgaatgggaaactggttaatattccagtgccttgaaagttcgttattcacctcttctgtcgcttccggatagggtaagcagaaccgtcgttctgtctaagtattctagctttgaggagtgccgtaatggcgagaattaaagcgagataccaatggccttctgcaaggagggtttacttgattccaggagacaatgaaagcagaaataggaagatactttcaagaccgtaccgagatccgacactggtgccctggatgagaagtctaaggtctatcgggtataccgtatggcaagggaactcggcaaaatagctccgtacctatggtataaggagtgcctgcagtttttacgaggagtagggactgcaggtcgcagtgactagggggtcccgactgtttaataaaaacacaggtggtcgctagtccgaaaggatgtgtatggcctctgtatcctggccagtggcggtacctaaaacctgggttcaactgggctaagggccgctaaacgccgggagtaactctgactctcttaaggtagccaaatgccttgtcgggtaagttccgacgtgcatgaatggaacaacgagggccccgctgtccctgcctacaacccggtgaagccacataacggggacgaacagtccccgaacctctgtcggggagagaagaccctgtggagctttactgcagcctgttgttgcgatatggtgtcaaatgcagagagtagctgggagccgttatggtcagttctccgggactgatctaggcaaaagtgtaacaccagccatttgttaccgtatcgctaacctgtttaacagggacatcggcaggtgggcagttcggctggggcggcacccccttgaaaatgtatcgagggggcccaaagattggctcaggcgggacagaactccgccggtgagggcaaagccaaaagccagtctgactggattcccaatgatacgggattcagaggcgaaagccgggcttagcgatccatcatgtcctcactattgggggctggtggtgacagaaaagttaccctagggataacaggctcgtcgcgggcgagagctcccatcgaccccgcggtttggtacctcgatgtcggctcttcccatcctggttctgcagcaggagccaagggtggggctgctcgcccattaaaggggaacgtgagctgggtttagaccgtcgtgagacaggtcggtctctgcctgacaggggcgtggttgtctgaggggaagttgcccctagtacgagaggaacagggcagcgcagcctctggtttatcagttgtccgacagggcaagctgagcagctaagctgtttaggataactcctgaaagcatctaaggaggaagcctttcccgagaaaagacaaccttccgtaaggaggagggcggccatagaagatggcgttgatggaatggaggtgtaattatcaagccttcgggcgagatattcagcctgccatcaccaatagcccaacgcacctgatctgtaattaaaaaattacaaccgacaagaaaattagtgaattaatacactataacacatttatctggtactattaacaagattttgaaaattttgttcatgactatattgtgcgtaaagagtagtgtcgtatattggaatcaattatttgtgatgctatagttattgatatctctactattcaacggagtttttctaattgtatctatatatttatttacattgggataataatttttatcacatatcgaatacatttgagttcctactaacgagattttaatattagtaagtacgatataaacatctaaatatcaatcttatgctaaattctcgttatattgaaaagtatttgtatatcccataaggaagatgttgatgggatagtttccgctgcgttactacaaaacgctttgaagattaggaacatatttttggtagattatccaaatttattgaattccttagactataccatatctctatgtcataagaatagaaaattctcaagagtttttatttgtgatgttggtctaaacaaaaagaatcaaaacttatttatagacaagttaaagatcctgcttcttagaaatatagaagttatctatatagatcatcactatcttgaggtggaaataagaagagagctggaatcaattggagtgaaactaattcatgatatcaatgattgcacttctgttcaaatttatcatctagttagaacaaaattaagcagtgggtttgcgttttacgctgctgcagcagcgttaacggattatatggagtcaaatccaaaggcaagtttattagttagtaaatatgatcgaacgttcttaatgttggaatcgtgtttcttatcatatatcatatcttcttcgcaaaagaatatcgactttctaaagtttatctctagagcgatatccaaaggtaaaatgccgcatgagattaagaatggatttagattggtcagggagttttgtgagaagattaataaagcaattaccatagtagaagagcaatctaaacacttgaacaatatctcatattttgaacataatttagagttgtcttcaagcatgatagtaaatttcgttttgggtattacgggtaagaaggttggaatagcatttaaattaaaatcaaatattaattcatatattctttctattcgtggatctaaggaatgcaagattcatctggggatgatagtaaacaatttgtctgcggaattaaatggtagcggaggtgggcatgataaagcatgcggagctgtaatacctacagagaatttcaataaatttttagatagattagatcaagcaatcatctaaccatatccaaaaaactatttaatcaatatttgatttataacatagattccgatatgaccagaataggagagatatatcgtagggtgcatggtagattagttgaacgaccgactaattttagttgggtgatcccacaaaagttggctggtagtggcttgccatcatcttatgatcaactcacatggcttgcgtctaataatataaaaagtttggttactgtcagagagattcccttaccagaaatttggattcaaaaagtgaattctcaaaaccacgagttagaaaattattttttgaaaacagatgattataatgcaccaactatcgacgaaattcatgaagtggtggattatatcgaaaaaaagatcgaaggaaataagcccgtattggttcactgtgctgcaggaaagggaaggacaggaaccatcttggcggcatatttgataaaaaaggatgggttgactccatatgaagcagtaaagaaattgagactaatgagacctggatcagttcaatcagaacgacaatctatggccattgaacactatcatagattccttaaccaataaatttagtactattaataaaactgcaaaatttaaattgactcaaaagttccatatctattgacgattaacatgatgttcaattccttacaagattatcgagttagaataaataaaaagatgaaagtgattatagtatttctagcatcattttttatcatcacttctctattttctgttaatacttttaattctgtcccattcgttagtgggtcggaagataacctaactttagacttcgatcaaatggccacccgcgatagtcccgatcttaccaccagagaatatagtaattcgctacctgatctttttgatagggtcgagaaatcagtggttcagataactgaaccggggaacacccaagctaccgaacctaaccagtcaagattgggatctggatttgtatatgataaattaggacacattgttactaactttcatgtggtagatggttcaaagaataataaagtctacgtaacatttctggatggagtatcatatgaaggtgatattataggaaccgatccttattcagacctcgccgttcttaaactttctgaagtggataagaatattagttccaaattggtcccattagaattgggtaattcttctacgattcgaatcggacaaaaagttgtagctgttggaaacccttttggattgtcgggatctttatctgaaggcattatcagtggtcttggaaggctaatgccagctggctataatggtggatccccgcaaaatccgtttgataaaccccagataatgaaatcagttccgtcattttcaatacctgacatcattcaaacagatgccgccataaatcccggtaactcaggaggtccactaattgatatgaatgccaatgttatcggaattaatacggctattttctccaatactggggtttattctgggatcggatttgccattccttctaattttctgacaaaaattgtacccctcttaataaaaaacggagaatacgatcatccatacattggggtaaatggatttgatataactccagagatagcaaaattattgaatttgcctgaagctgtgggctttttagtgatcaacgttacagatgatagtcctgccaaactagctgggttactaggaggcaataaaagcatggtaataaacggattgcctatcgaacttggtggcgatatagttaccgagatagatggaaagtctgttagaaaagtggatgacattttatcatatttagagaattacaagcgtataggtgataacgttactctaacagtattaagaggtccagatcttgttaaacaggtcttaacgatcccattaactgctagaccgtccttggaaacgaatttgactcatccatctttgggcgtaataggtttggatgtaacccctgaaattgccaagttaatgaatatttcacgtgacaatggctttttaattacgagcataattggtaatagttctgcttctaaagcgaatttgaggggtagctatgtagttaccgaggttaatgggacagtgttggagttaggaggagacataatagtaaagatggataatgtcgaagtaaagaaccaaatggacataaagaattacttaaagacaaagaatattggcgattctattgtcattaccttgttaagagacgaacactatttaacaaaatccctagttcttgatccgattagcgaaaatcaacgaatattggaggattccaaaaacactacaaatgatttgtctcatcctctctcacaggatgaccttaaagaatttttagagtcatgcgcaaaggtgttgcctggggaggcttgcgaatcgatgataatcataaaataatattctcgcaatacatgatatatatcggccttaaaatatagttatagggaacatgatttcaaggaatgaagatgaattccacttattttgtaaacaagtagtggatttggatccaagtatacggtttgcgggtatcgcggatgaggatggaaaattggaatccatagccgaaagaatcgggctggtcccactattaactcctgaggagagggctcaatatgccattactgctgctactaggcagtatacacgtctgaggtgggaatacatgttaggtaaaatacaatatgctagttcaaaatacgaacgcctgattagagctaccataccaattactgacgaaaatagtactttatcgtatgtcttactattgtctttcgatcctgagattacaaatgttcatcaaattattacagaaaaaataattccgtttataaacgagaacaaaaccaacctgacgaaattacacaataagtaagaatgacaaccttattagacatgttgtatccgaataagttttttttattgtaatattttttagagtaaaatttacctataataaacgaagatgttatatacccgaaaaatctacctaatgatgcatgaataagttcaatgtattcgtagttttaagtatcgtagctgccgcatctttatttggagcaatggtaacaccagctctcgcacaagacaatatgacaatgaccatggacaattcctcaatgccaatggacaatatgtcaatgccaatggacgataatatgactatgacgatggataatagtacagtatcttaaactagattaagatattaaccaataatattttttttagaattgattttttattttttacataatttttttttgaattcgatgatatgtaaccgatgattaaataaggccaaatataattatttttaatgacttttgacaatctatccgaatatttgaacgccttagaatcagctggcgaattaataaaagtgcagacggaagtaaattctgatttagaagtcgctgagattatgagacgtttgatgtatacaaagaaaagtccagctattctctttgaaaacataaaggattttgaaatccccatcctcggcaatgcattcggatcgattaagagattacaaatagctttagacttggatgatttttcagaaatagggaatagaatagttgagatgacccgaatgaaaatgccctcaggggtcttaaataaactaaaaatgcttccaaggttatcggagatctctgagtacggccctaaaattgtggataaaggtcaggttcaagaggtcattgaaacacataatccttccttcaaacaatttcctattctcaaatcctttaaacaagatgcaggaagatttattacctttggaatgaccgttaccaaacatccagaaaccgccattcgaaacataggggtttatcgcattcaaattttgaatgacaatcaagcgataatgcactggcagattcataaacgtggtgctcagcattctgatatctcaaaagaatctaaaaaaccaatcgaagcagcaatagtaattggggccgaccccgggactattttcagcagcatagccccagttccggagggtatggataaatttctatttgcaggtatttctcggaagaaaggggtaaaaatggtaaagtgcgagacagtagatttggaggttcctgctaattcagaaatcgtatttgaaggcgtcatcaatccagaacaccttgaaactgaagggccatttggtgatcatactggatattataccccacctgacaaattccctgtatttaccttaaccggtgttatgcatagaaaaaagcctatttatttgaccactgtagtgggaaaacccattctcgaggatgcttattttggaaagttgatagaaaggtcttttttacctttgatacagatgttccaacccgaggtagtagatttctcgatgccggcagccggatggtttcaaggattgggaattatctctattaagaagagataccctgggcaagcaaaaaaggtgatgatgggattatgggggttgggccaactttccttaactaagatttttgtagtagttgaccatgatattgatgttcatgatatggataagattatttgggccgtaaccaccaaagcggacccaaaacgggatatattgataatagagaatgtacctactgatactttggatccttcatctcctttagtaaattttggatcaaaaatggggatagacgccacaaccaaatggagagaagagggtttttttagggagattcaggaggaagttcaagttgatgaggaaacgaaattattagttgacaaaaagtggtctttgtatggatttcctctaggaaaaaccaacaccaaccatatcgactgaaaggattttttgaatgtattcatgcatgcctaaaatcaacttaaagccttatatttaggaaattcgtatagtaagttactaagatagataatgtctactaaagacaagatcaagactaacaacctccagttgaaaaaagccatgaaatgtgagagtttggatgaagggacatttgcattcttgaattggatgaattgcaagtcatttgatagtgaaggatatgatcagagcccacctttaatcttgaaatatgttgattttcctaaggttgatttggtaaaactatttgatggatttttgggaaaggacattattgtcaatatagttgattgcataccaacatgtaagacatgtatagcagacgattgttcacatatcggttttactatatgcttactccagctaattgagcgagagggatatgaatcaatggacgacatattgaaataaataattggtaaaattgagaaattggattgacaaaatactacgagaagaatttatgataaaatttttatattcattagtctaaggtttgttgatgactgagaataatgagtatgttccgaatgtagtggctttggaggtattagaaaaaaatggtgtaaatattgaaagactaaaagaattgataaccaaaggcgtgggtgcggaatttaccacctattattattatactattttgaggatgcactgtacaggtctcgatggggaaggaatcaaggagatagttgaagatgcgaggattgaagatagaaaccactttgaggctatggttccacgactctatgaattggggggaagtttgccacgagatatacgagattttgcaacccaagctggatgtccagacgcatatttgccagagaattggaaggatttaacttctatcataaaagtacttttggaagcagaacaatgtgctatccgttcctggggagaagtatgtgacatgactggtggaaaagaccctagaacgttcgatattgcccaaaggattatgcaggaggaaattgagcacgaagcttggttcattgaactattatcaaaaagaccctctgggcactttagaagaaactttcctggacaatcgccgtatacttctggtgccggtggactcagccacctttaatttttattcaagtcaaattgcttttatattgtttttagggttttttggaaacttttacttattaataaatgagaaccgcacaattatgaattcgtactgtaaagtagtcatttaactttgccttataagattttttcaataatagagaaatattttataaacccattgtaaactaatgataatggtattgcacttgacaaatagaaggaaaggggaagttctaatggctatagctgggattggcctggccataggtgctatgagtatcagcgtaccacaagtcgcatatgcaggcttgtgtataactggtttggggatagtatcgatgttgtggagatagaaataatggatgcctcttaactttgtgcttcgtaaatgtggtataaaatgcaagacagcactggaaactattcgactaaatatacaatatgataatttaggtagagatagagtaaatctgtttcatcagcttttgtacaaatggaaccctaatgaaattttcatgttagctgataatcttagtatcaattgagtatgaagggtccgaaaacaattagaaatacaatatttgtagatacatatccaggagttatttaacggttgttcgatgtatgattttttcttcgtattttaacttgagtcttatttcttaaaagtagaattcttcaaatcccaacaacgtctgcataattggccattaatatgccacagtggtttggggttatatctgatgaaacccaatttcttgttgcattcatagcaataattattgattttttcgtattctttggcttttctttcatagcattgaatgcacatcagttgagtagtattcagattccacctccattcaggtttcttaacttcaccggaaatcagattcttacacacaaagcatatctggtagtttgtttcggatttcatgggatatgaatttttaattggtttactaatatttgatttctctgtttcattgggttgaaaatattctttgtttgaatctatatcctcttccttattagaacgggctgattttcttctaaatggaatcttcacttcaaaatatattccaatttgtcttattttagagttgtaatattctttcttccaaagcaaatacttaatttttagaactcttcatttaatgttgttgtcaaagtcttactatgacatacttgagatagaccaacatgcaactattgccgatatcaaaaaatcattcagacttcttgccctaaagcaccatcctgacaagaataaaagtaacgagtctcatcaaaagttcttacaaatagtagaggcctacgaagtactttctgacgaaaattcaagaaggaaatatgacttgatcaattcttcaaaccaattttctaattttatccccaattggacaccatcggctgacttgtcaaaattttatagttacgatgtcataaagaattggtacgtacctaacaagtctactgggggtatgtgggacataggagaaaaggaaaaccttggaatgtggaagaccacattagcactatttggatcattagcatgtgttgcagtttttattattattttatcaaattaattattgcaactatcaatctttcttaatattagagataaccaaaaataactagacgtttttgtttctcattttttacggctaggaagtatccgttccatgaatttcatcataaacatcattttcttatccttcgagtatttcacatttttttaatctcacacaagtttgaattctaactttttgtactattagcaggttcccaaatgtaggagactctctctctatccttaaagtagctaagtggtaactgaagataacacaataaaagacataccgaaccttttggatattttatcgaattcttgaaaaattccttaattgtagtggatacaggagcattgaaatcaaattttcttgtcagttcctttaactgattatgccctattaatgctctcactatctgactataaaaatcatgtttggtgattggaggagtaaaatagattattgcatcgtcatcatagattaccttcttgttcatttcaagcactctacattggagatataggtctatcgctattatttcctggggaatttctatccctctggccaattcagtattcaaggcgattgcccttcccatagttgtatattgagaaaggccgttcaatcttatcgaccttaaccaataaccgataaaaatagatgcacaagcatataggtttgtactattacttttagggactgtattagacgcacacaacccaacgatatctgagatcctattagataattgggatatgcaattttctccgatctcaatgtctgcgtccaataatactataatactaccttttgcatttctgaatatagcattccatccttgacttgccccttttcttgtttcattgtgaattaaacgaatcctgaattctggattttgagactttattttgttgattagaattggagtttcatcatttgaatcgtctacgaaaataacctctgtgataactaacttgtctcctaaccgttgagctttgagcgaatcaaagaatttcaaaatattattttcttcgttataagtaattattcctattgtgatatcgcttttattcatgtcgcctcgatattctctctaattttttgagctatactctcaagctcctttatctgtgcaatcttgcgcatgggccattgacctttaactttctcaatcgaatatctggggactatatgaacgtgcacatgaggtacaatctgatttgcagattttccattattctggttgatgttaaaaccatcactacctaaaacactagcaattgcctttgctaatcgtgggactaatgaatgcatctctcctacttcctttatcggcatttccagaatatttctaaaatgttttttaggtactatcagagaatgtccatgatttatagggtatttatccatgaaagctaaaaatttttcatcttcataaattattgcattgggtagatttttcagtataatttgacaaaaaatacaattgtgattcaatgtctgcatcattatcaagataataatattgaaatatttaatttaatatttaacagttaatatgttttgtcataatttggtgtttatttttagttcattttaaatagctcgaaaattttttacaaagtatgagtgaatcaattgagttagaaagttttacactgaatttttctttcccatgcccgaaatgcgaataccttaatgagatctcttcaagtgaattgcataataatagcatcgaatgtggaatgtgtgagacaatattcaagtttgagggtttggattctataaaaatattagctactttggagtagtgagataatcttacgaaaaagaattaagtttttattttgtgattttaatctagatatttgtaatgattttacctagcagaaaaacagttgaaggagcatcccgagcgcctcatagggcaatgtacaagtcgatgggtctctcagacgatgattcttggtaggcctttagtagcagtttctagtacttgtaatgaggcaaccccatgtaatattcacttggggaaacttgctcaaaaagctaaggaaggtgtgaaggactctggaaatactcctcgggaatttactaccatagctgtttctgatgggattgcaatgggacacgaagggatgaaatcctctctagttagccgtgagatcattgcggattcgattgaggttatggtcagagcacatcaatatgatgcaatagtgggaatttccggatgtgataaaagcttaccgggaactttaatggctatggctcgactcaatttaccttccatcttcgtttatggcggtaccattcttcctggtaattggaatggcaatccggttacgattcaggatgtgtacgaggcagtgggaacatatgatgctggtaaaatgagcttggaagaattgacaagtctagaaaatgttgcctgcccatcggccggatcatgtgcaggaatgtataccgctaataccatggcgtccataagcgaagccttagggatgtcattaccggggagtgcaacaccacccgcggaaagtgaagaaaggcacaaaatttgctttgaaacgggaaaatctatagatcagctcttgctcagcgatttgaaacctagggatataatgacttacgaagcattcgaaaatgcgatcatgatggcaaatgcgataggaggttcgactaatgcgatacttcatatattagcactgtcgcgtgaaacaggaatcgatttggatataaaggattttgaatatatacgaaaaaaaacgcctcatattgcaaatatgagaccgggtgggagttacgtaatgttgaacttggataatattggaggcatccctgtaattttgaaatcattgtttgataaaggtatcttaaatggtaacgtagagaccgttactggtaagacaatgaaaaaaaatctcgagtcctatgactttagcaaatccaagtcttactataaagcacaaaaaacggaatttcgaaatatccttcgaactgtcgataatccaatacacaaagaaggaacgttaaaaattttattcggaaatttggctccagagggcgctgtaatcaaaattgcaggattgaaacaagataaatttgaagggattgcaaaagtttatcattcagaagaatctgcatttgacgctgtttctaaaagagaaatcagcgaaggtgaagttgttgttataagattcgagggtccgaagggtggaccgggaatgagggaaatgcttgcagtgacagcggccattgtgggtcaagggttgggtgaaaaagttgctatgctcactgatggtcgattctctggcgcaaccaggggatttatgatagggcatatgtctccagaagcaatggtgggtggaccaatttcaataatcaaaaatggtgacaatatcaagatcgatttactcaaagaaacggttgatctcaagatttcaaagaaagaattcacaaataggatcaagaaatttaaacctataaaaaataggtaccggtcaggggccctagcaaaatatgcaacattggtcagatctgcatcagaaggtgctataacctctccgataccaaaatatatgaaaaaaaacttcacctaattttttatttcaatggaatctatgatcccataaagtggaaagttatgaaaatgatcggctattttgttatcaaggaaaataatttgaattagctcaaaattattgagtatcaatactaccttactattctcagatacaagtttatcatctgtaaaaaagtctactgttccgtcgataaatatggtgtcatcatttccaaaaaacacatttccatcgccattgaaattgttaactgtatgccagtgaaatcctctggcatttgaggagatcattacgaattttgaatcaaaaaattcaactttcgaagaattaatattcatctcccaattgccggaaactattgttgaaatattcgtattaatgaggctaccagagtcattagcatttacatagttactaatggttggatttcctttttcaatcgattgaataataatacccgaaagcattgaaaccaaattatttgataagttatcggtctgattcaattgacctgtcccagtagtatcctcacgagtgctctgacttaagttcatgtttgattgtaaactgtctgtgctgattacgctatcattccgttgcgtaggtgattcagtttgatacgaattttgaatattcataccaagaggtgaagacgtaattaattgattattttcattggatccgttatttggaattagcgatgtattcaaggtggaaaccaggaatcccgaaagtgcaaaggtattgttgacatcaagtcggctgctctttgaatccaagcttttttctttaaacaagatattttttgtttcggcaagtacggcatggaaagtactttgagtgaaatagagcaagaaaactaatatgagtagtagtaaaattcttgtcaaatccaataattataatattactgaatttttttaaataaatttctttccttagtaaatttaatccaaaaatttatgaatcttaaagtcctataaacttgcaatgttgaacaaagatcaattttttgatttcttaaaattacataacaacacggaattttctaaagaagagattattaatcgctttgcagagtctaaaaatgaggagcaaaatatagactctctgttgtctgaacttgaggttgaatctacttatacgaactcaaatctgattgcatcatgtaaagctggaaccgtatactataagtggaaaagatcttaataccgatatttgatttttgattttatcgagttcaataaccgttgacttcaatatcctcaaattcactgtggattaaatccagcacttcataaagcgtattaaggtaaacaatttcatcagatttgcaattcataccatacgcataatttattctagaattcaataaattattcatattttttgtacaggtataattcaaaagtattacgtaatttcccagtaaatttttgttaatgaacatttttttactagttgatttggattcgattctaataccttcgtcagaatctaggaacgttaacaattgcaaaaggattttctcagtgggattaactatcaaataattacagagtaaattacaaaccaatcaatttaaaacttataattaacatgtggaaagtttatcaagttgaaactaatcaaaaaaggcaaagtaaaggatatttatgaaaccaatgacaacacattaattttttctttttctgatagaatatctgcctttgacgttattctaaacgatgaaattccttataaaggaaaaatcctgtgtgattttgcgcttttttggtttaagatcttgaaagggaaaaaccaccttaggagaagaatagatgccaataagattgaagtagcaaagctgaacatgattccaatggagtgcgtagttcgatcatacttatatggaagcttatattctaggtatcttcaggatactatagatattcctgggaaggaggaatattttgcagataagaatttggaattagcttcaaaattacccggtcttgtgtttgatccgactactaaatctgatcaacatgacatacctatcacggaaacagaaattattaaagataagatagtaagtcaaacggaattagttcaaataaaagagctatccctagagttgtttacgcaagtagataccaccgtttctgctagcggttttattctttcagatatcaagtttgaattcggaaaagacccaacgacaggagaaataatcctcggagattcgattggacctgatgaatttcgaatttggaataaagatgattaccaagttggacagattcaggatagttatgacaaacaaatattaagagattggctacaagaaatcggcttcagacaagaagtagaaaaatgcaatattactaatactaaaccaaatattccaaagttacccaaggatataatcgaaaaagtgtctcagcggtacattgatgcttatgagcgcataacaggagctacttttacgaggttggactaatgaagcaaattattgggtggtcatcgttatttattctatacttatgattagcaggcctttttttgaagggtctctcaataactctaccatcttcctaggaacgtgtatggcactaacattacaacttaggcacagggtccgattacaaataaaattgctccttcttaaaacaatatcgtgagcatgtgtaaggagaaggttatcattcccaaacccatgtattttgaaggtaaacggttcaacaaccaaatctatttttataaaagattggttactcctgatcctattcttgatgccactcgttagatctgaacatgatttggttgcgttgactcctataatacaatcaccacttggtgtcaaattaggatctttggtgatttctatagttcgagcatggagcgatcgaatattcttatggccacaaaattggatttcttctgttaacaactggccaactttattcatattattggttaaataatcctttattttttaattaaggtaactataaataaagatttagaagtaatctagttgatttgttaccagcagcagcaggttatgatagaggaattactgttttctcacctgatgggcgattatatcaggttgaatatgcaattgaaaccgttaggagaggcactttagctttagggattaaaagcacagatggtgtaatccttgcagtagaagagaaaacgagaaaattgcagatatctaatgtaactcaaaaaatatttcagatagatgatcatataggtcttgccgcagcagggtatattccagacgctcgtactcaggttgaccacgcacgattttttgcccagagcaatcgcctcatttatgatgaagtagttgacgttgaaggcgttgcaaaaaaccttgctgatatggctcaacagtatacccaatatgctggagccaggccattcggtgtcgcattgatattggctggtgtcgacaagaatggaataggcttgtatcttactgacccaagtggtacatacatcggatacgatgctgtggcaattggtgcaggaagcgaacaagtaactgaacacttagaaaagacttataggaatgatattagtctcgataaagcttgtgtacttgcaattgaatctattttcatggtcagtgaagaaaagaccggcactaaacacattagattggctgtcattgattcaaaatcaaaaactttgcgaatgatgccgttagaagaaatagagaattattcaaaacaagttcaagataaagaaagtcaatcttaacttgttttgatttattttttcaaaatagtactttaattgtttatacgaccatttaaataattcttattttattgaaaaattgattatcaatggcgatagaaattggttccaaagcacctaatttgcaagtttctaaatgggtacaaggtactcctacaaatatagataaattggccggaaatgtagtcgttgttgaagtgtttcaagttaattgtccaggatgttttctatatggaattccgcaggcaatttccctgtatgaaaaatttaaggacaaaaatgttaaggtattaggagtcgcaactgcattcgaagattatgacaagaacaccctacaaaaccttgaaactttgctctcagaaaatcaagtaattggagagacatttagagcactaaaacagcatggtaaattagttgatgaaaacaagttatattacaagataccatttccagtagcttttgataaagttatcagaatgcctgtcgaagtttcagacaagatgatttttgattttattgaaatatatttttctgatttttctacattttcagacaaagataaaacagaccttattaacaaggtacgaaattatttacagaataaggaattctcggcattgacatttgagacttatagactgagggggacaccctcatctatagttgtagataaagaaggaatattgaggtatagtttttttggatctgaaggttatttggaaggagcagtgaacgagttactaaatgaacggtgatttatatttcaaattcactgaaatttgatgtttctattccagattcgttcttgtatgacgtttcgacagaaattgataaaaccctaaaaatctttcaattatcaagagcattatcgatttttagagtcaataacttatttatttatcacgataaattattgaatacgagcaaggatgatctccaattcatggtaaccatccttgaatatcttgatacaccccagtatttaagaaggaaaatatatcctaaacttgaaatattgaaaaacgttggaaagcttcatccaataagatcacatcatcataaggaccgtatagaaataagtgacgtcaaaactggggaaattagggttggagttgttgagaaaagaagggatatctattttgtagatgttggattaagatttccaatcaaatacgatggaaaatttaagcatgatggtaggaaagtaaatgtaaagttactaaagcataaaaattacattaatgcgattgatatcgaaaaaaacgaaataacagaaaaatactggggatacaatgtaaatcaaataaaagaactaaaaaatattatggaaaaatttcctgtatcaaacattatccttacatctaaatattcaaaatactttaatccttatgagaatgaattttctaaagtgaatagatctttaaacaacaattcaatcttagtcgtatttggatcaccaaaatttggattgaattctatcttgtcaaaggagaaaatgaacatttccaagtattattcctttaacttcttcccaaatcaaggtactcaaacagttagattagaagagtcaatatacggtgttttgtctatcctgaatatctatttacctaccttgtagtcagtttatagcgataataaacttattaatgggatcggaaaaatttttgtatctatgggtcaccgaaaatatagcgcaccacgaagaggtagcatcgcatttcgaccacgggccagagcacaaagcttagaagctagagtaagaacatggcccgaaaattttagtcgtgataatgttggcttggttggatttgccggttttaaagtaggtcaaattcaggtaatgacaattgatgataaggaaaagactccaaattatggtaaaccattaatgaatcattctacagtgatatctttaccgcctttaaaaatagttggaatccgaggttattctgaagatggatatggtaagcatgcgatattcgatgtttatgctaaagaaagtattaaagatttatcttcaaagtacaaaataaagtattcggaggatggattaaaaaaagcagaaggaatgatcgaatctgttaagcatttaaacgctgtagtcgcagtttttcctaataaaattgggatatcacaaaaagttccatttatttacgaaattccagtatcaggaggcgataataagatcaagtttgaattcttaaaatctaaactaggtcaagaagtgagagtaactgatgtttttaagacaggacagaatatcgatgttcatgggattaccaggggtaagggtgttgaaggtccagttacgagatttggtgttaaaagaaaacaacacaaatcacgaaagagtgttagagctgttggaacgttaggaccaatctcacctgcagtggtaatgtatactgtggcaagacaaggacaaagagggtttcaccagcgtaccgaatataataaaagaatcctagtaatgtcaaattcagataatactgaattggtaaatattaatccaaaaggagggttcaaacattttgggttagtggatggagattatatgatagttagaggaactatacctggagtaccaaagagattaataaagttgagacaaccaataaggagcaaacaatcaaaaataagcgaacccaaggtattggaggtaattgtgtaaatgaaaactaatcttttcgacttaaaaggtaatcaaaccggggatatagatttaccattattatttaattttccatatcgtcctgagataattaaaaaagcattcgtcaatctgtattcacaccgtttccagaaacagggtaggtatccagctgccggggagatagtaagcgctgaatctaggaataccggtttaggaatcgctcgacttgcaagagcaaaaggtgagggattttctcgtgcaggacaagcagccggagtagcaggtgttagaaaaggcagacttgcacatccaccagaatcttggaaggtcactcataaaaaactgaacaagaaggaaaataatatcgctcttctgtctgctatatcgtcaacccgtcaaagtgaactagtaatcagcagaggtcattcaataggaagcataaagtcttttcctattgtagtaactaacgatattgagaatgtgggtaaaaccaaaaacttgcttgatattctacgcctattaggtttagaagaagatattaaaagagttgaacaatcaatcaagaagcgttcagggaaagccaagagaagaggccgtcctaatcgtattggcaaaagtgctttgataattgttggaaatacagagtgtgagttattgaaattggataaatctataccggggattggtgtaaaatgtgtaaaggatttaagcgttttagaccttgctcccggtgcaagaccaataaggttagtagtgttttcgcaaaatgcattagacgaattgagtaacctgaaaattccgaaaaatatgatcctggagaacctgacatgaataaatttttgtataataaaaaaattgaaattagtgctgataccgcaagtaaaataattcttgagccttatgtgaccgaaaagacattcaatattatagaaaaagagaataaacttagttttatcgtccataataaggcgactaaaggtcaaatcattaaatctatgaagataatttatgaagcagagattagcgaagtaaatacttttaataccattagaggtaagaaagcaattatgaaattcaagaatgtggatggcgcaagacagctcgcaactaatttaggtttagtgtaaaatatggaaaattttgctataaagactgaattaaaatttaagtttaggggtatgtaaaaaatggtacgtgaatttaaattcaaaggatattccggagaacaaatccaaaaactatcaattgaaactctcatgccgctcttaaactcaaggcaaagacgatccttggacaagaggctctctacctatatgaatgacgaaaagagaaaattcagagaagatttgaaattagctagggatggtaaacttaaaggtcaattgaaaactcatctaagagatatgattattttgccagatatgatcggattaacagttttggtacataatggaaaagaatttgtctcttacgttataaagccagaaatggtgggtcattatctgggcgaatacgctattacgaataaacgagttcaacatggagcacctggtgttggttcatcacgttcaagcttgtatgtcccattgaagtgatatagatgccagaatattcttattcatttcaaaagtatgagaagtcaagacatgtaagggccgcaataagggacaaatctatttcacataagcattccagagaaattgctatagctataaacaacaagagcatagaaaaagcaagggagttcctggaggatgttttgataagaaaaatagcagtcccgttccggagatataacaatgaagtagctcataggtcaaatatccaagatggattttgctctggtagatatccacacaaatcaacatccgagttcttgaaattactagacaacctagaatctaacgcagagtacaagggaatggatttggatagacttaaaatcatttccgtagttgtacataagggtacaaaattgaaaagattcactcctagagccatgggaagagcaagtcccaaatatgatactttagttcatgttgaaattgtagccatggaaggcaggtcgtcttaattgaatgcaatcaaaaacgtgctaaaaaacaattatcgtaatacagaattagacgaatttctaaaagaggaattaaaggatgccggctttggaggagctgatatccaaaaatcacccctgggtactagactaaccttgtatgtaacaagaccaggactcgttattggaaggaagggcagtggtattagagatcttacatctaagttggaggtgaaattcggattaacaaatccacaaatttcagtcgttgaggtagaagtaccagaactaaatccaaaaataatgtgtaacaggttagcacaactcattgaaagaggcactgctttcaggcgagctgcattgtggacagtgaatacaataaagaatgctggggcactcggcgttgaggttaccatttctggaaagttacgtagtgaaagagctcattttgaaaaacattcttctgggattattcctaaaagtggcaatatggctgatagagtcgtccgtgaagggatcacacatgttctaacaaaaatgggaatcatgggaattcgactaaaaattgcgataaaaaatgctacgccgccagaatttgaactcatcactaattttaaagatcataaccatcaaaaaaatcaaccagatgataagaatttgtcagattctactgaaagtaatatgcaagaaccaaatgaagaaaaacagcagaaagaaatattagaaaaaagcggagagataaataaataattgtcaagaaataaaaccaaaacattaagacaatttaacgacgatgatcttaaggataaattaagtgatttgaaggtcgatttggctaagcttcgctctgagtcaattaaagggactttaaagaaagaagctggagttattagatggaagagaagggacattgcgagaatccttaccttgatgaatgaaagaactggggttaagaaatagaaaatgcagacaggaaatttaatacattttaatgagtgtcttggtagatttgttaatattattaaatctagtaatataaggaattcgaacagatctggaattattgtaaacgaaacgaagaacatgttatatttgattaacgggaagactaaaaacgtcataaagattccaaaaaatgaaatctgtgaatatgaaatttgtcattctagtggaacttatacacttgatggcaagcgattattaggcagacccgaggaactagctaacatactaaagtgattatcatggctaagaatattggtatccaagtaaaagctccgaagaaaacatgtactaacagatattgtcctttttgtggttccctgtcactaagaggaaaattgatagtagggactgtagttagtcataaagggaaaaacatggttgtagtagagcgagaatattccagatttgtagacaagtataaaagatatgagagaagcaaatccaaaattcatgctttcatctctgactgcatggatgtgtctgatggaaacaaagttaaaattgcagaatgtcgacctttgtcgaagaccatttcatttgctgtagtggaggtaagtgaataatcttgtcaactaaatcaagagccgtatcttcgagaggagtagaagaatttaggccgtatgttacaagagcacttccaatcatggcaaatcttgtctgtgcagacaataccggtgcaaaaatactacaaattgctcaagttacaagatacaagggaaggcattcgagactacctgcagccgcagttggtgatttcgttacagttactgtaaaaaaagggccagccgaactcagaaaacaaatttttggggccgtcatagtcagacagaaatatccaatccggaggctgaatggtgtccgagtatcttttgaagataatgctgcggttttggttacaacagaaggcgaaattaaaggaacagacttgaaggggccagtagctgcagaagctgctgaaaagtggcctagaattgctaatttagcatccatgattatctaagtgaaaaaaatgaaaagaaaatcaaataatatatgttcgaatttatccaacaacctgaagaaggagtataataccaagagtttgagaatagtaaaaggcgattcagtcaaaatcatgcgaggcgaatataagggagtagaaggaaaagtagagaaactaaatactgtgaaaggaagattaagtatagaaggtgttcaaagggaaaaaatcaaaggcggtcaagttaaagttcagattcatgcctccaatgtacgtataacctcattacatctagatgataaatatcgaaagaataagataggaaatcaggaacaaattaataaatcgtcaagaaaacaaacagtgaatacacctgaaaaaaatgaggaaaaaaagtgaaaattaaatggtaaaaaaaagtggtagtacaaaattaaaaagacaaatggcgcctaaattctgggatattaagcgtaaagaatcccctttcattctggcacctaaacctggtccttattcaaagacaaaatgctattcgatcggggtattgattcgcgatgttttgcatttgtgttcaaatctgactgaagctaagagaatactaaattctggacaaatcaaagtggatggtaaaataagaagagatgggcgttttggtgtaggaatcatggatgttgtggagatagtaccgagtggtatggcttatagaatggtgcctaagggttcaaaattactagtcccagctcaaacaacagaaaaaacaataaaattgttaaaaatcactagtaaggtgagttatcgaggaagcaagatccaatatggttttcacgatggtaaaaccttgatatcggataataaggatatgaatgttggcgattcctgtttggtaacgattcctataataaatatagaacaacacattaaattcgagaatggatgtaatattcttgtagttcagggggaaaatgctggcaaaattggaaaggtagaagagatcaaggacggtatgttttcgttacctaagagagtagtgttgacactagatgaaaaaaccgtggaattgcctgtggacatagtaatgcctgtcggtgttgaaaaaccagtattagaggtgttagttaatgagtgaaaataagataaacccaatgaaagaaattcatgtatctaaggtggtaattaatattggagtaggcaaatcgggagatcctgttgagaaagccaagaatgctttatctgagctaaccggaaaaactccaagtgtgaggggtgcgaaaaaaagcgtcagagactttggcatccacaaaggtgagcctataggcgcaatggttaccatgagaagaacagatgccacaaactttttaagacgaataatggaatcaaaggggaatgtgataaagaattcatcatttgataataatggtaacatatcatttggaatccatgaacatattgacattcctggtacaaaatataatcctgatattggtatatttggaatggatgtatgtgccgcattaatgaggcccggctacagaatttcaaaaaggagaaaccccagtaaaattggcaagaatcacaaaattacaaaagatgagtccattgaattctttaagactcaattcggagttgaagtcaattgaaaattaaaattagagattacgccctcaccggaaggaagaagttggcccatggcaagggtactcgatggtgtaaaagatgtggatcctttagtggcatgatctgttcttatgatcttatgttatgccgaagatgttttagagaggttgcctttgctctggggttcaggaaatacgaataggtgattattgaatgccagcattaaatattttatctaatctatttactactttgtataataacgaaatgcgaagaaagcgagaatgcatagtattacccgcgtcaaaattctcaagcgaagttttgagggtgatgcaaaagcaacgatatattggagaattcgaacaagtcgatgacgggagattgggtaagtttagaatacaactgttagcgaaaattaataagtgtgggatcattactcctaggtttagtgtaaagaaggatcgatacttagattgggaacgtcagtttcttccatcatataatatgggtatattaatagtatccaccagtaaaggaattatgtctcaccatgatgcccaaaatgaaggtttaggaggtgcactaataggttatgtctactaaacccgaattttacacaaatgagatcgttattccagatggcgtatcggtgaataaggatcagaacttaattacagcaaacggctcaaatggaaaagttcaaaaggattttactaaaattccggcattaatagaaattagcgaaggaaaaattacaataagatcttacggaaatagaaaaagcgattttgcactggtcaatactgtgcatagtctcattcgaaatatgataaagggttctacaactggattcacatataaattaaaaatagtgtttgcacactttcccatatccgtcaagattaagggacaacaggtttttatcgaaaacttttttggagaacgttcagctagaatatcaaagatacttggaaaggatactaaggttactgtgcatggtgatgatattttgattaccggaccaaatattgaacatgtatcccaaacagctgcaaatatagaatcatctacaaagataaaaaataaagactctagggtgtttcttgatggggtatacatatacttcaaagactaaatacttatgaaaaagtaatctatttaatatttttagatttaattacatttgagcataacgtttagttcttgcctaggacattaaagtagtaaacataacatttatttattctttacattttttattagcatagtgccgctgtagctcagcttggtagagcaaattcatgatggatgcattatgaagcttaactggctgttaaccagtaggtcatcagtccgagtctgatcagcggcgctttgattaaattagaacgaaactatgtctaacgctattgcatcggataataaataaatgtgtctgctacccgaaacaaaattattttttatatctatcctgggaacccacctatttgaagaagtaaatagtctttctttcttcattctattttcaagtgcttctatatcaagttctatctcttctatctcttcagtttccagattttgaattatcaataaaatttttttaattaataccctgtccccatttttagagaagtcgcgaagtctttcgtcttcttcaatgatttttattttaatctgttttcggtttaatgcgtctctactcataagcattctgtcgctcagatatccttcataacccattgagaatcattgtacatatgttgttaataattattttaatcttttaattttggagaattccaaatctaacttgttatctttaatacctacttgggaaatccttattgtatcttcaggtaatacatttttatcaacgcttccaattattcttatacctgaaaattcacctataccataatatccttttatgtctggaagattagaaaatgatttttctagtaggacaccctttctattgattttcttaaatccagttttcttgaaacaggtattgcaataacgatttggcggccagaaatgaattttacaactaaagcaatatgtggtaattaacgtgcctttagcagcgcttttaataatgaattctaataacttcatcttgcgctacttttgtaatattatcacagtagtggacgtacctgcagcagccatattgtgaactagacctctcttacaaccttttttttgtcttaaacctgcttttccttgtaattgaagtactatttcgttggtctgatcaatcccagtggcgccaatgggatgaccgcatccaagtaaccctcctctcacatttgtgtagggtgcgctttcttgtatgaattttctgccctgaccctttttcacaaatccaatatcctcataggctaagagttctaaaatagtaaatgcatcatgtatctctacgatatcaatgtttttaggtcccaacatcgattgttcaaaggcatctcttgctgctattctcgttgataatatggaatcaagatcatttgaaatggatccaaagctagcaccttggttatcctgggatatagccttgatccaaacgggtacttcagttctctttgccattgtatctgacaaaacaagtattgacgacgatccctcgcaaggataacaacagtcgaacttttttaatggttctactaacatttttgaatttattattgatgagtaagtaaagtgtttgtcatagaaaaatgcatttacgttcttgttagcactggcatgatttttcaaagaaataattgctaaatcttcttcagtggttccgtactttcgaaaatgattttgggcatatagtgaagcccagtgaattggcatgtcatattgtccccttgagctatcccatgttagtttgttaccttgactgttctgcttttctgctcctgttactaatactgctttgcatagcccagattttatcaacgagtaggcaagcataataccactggtacctgaattacataaattttcgaccttggtagaaaattttggtttgattcctatcatttctgatattatattgcctaagtatgattcgttagagctacttgatacaattagaccatctatttcagccttttgaattttcgttttcccaagtaattctattatggatttactagctaattcagctagtgtaaagtctgaaggcttggtaaatttttgagtacttgaagaatcaattgctatttccataactcagtaaaatccttgtagttaaaattaccgttattatcttttacaggattcatttgtaagattggtaaatcgataccgatttttttccagcgtttgatttgactattgcaatcatttatagaacctgtaatgacaaaatcattaagcatctcatccgtaatgttcctcattgactctgttagaccatatttgttgtaatcattatagatcctttcaactattggcttgtattttgttttaaccaatgattcatagtagattctgcccactgatatataaaaggccaaagttctagcagctctgagagatgccagactaggatctttattactaacggaggttataattacaaacgccttcataaattctcgattttgatctttaaatttgatgttatcaatcgccatttttaattcatcttttggttttaggtaaaggatgattccatctgcatactttgtagctatgttaatcattcctggatttacagcagcaacataaataggaatatcatccctagagtgttcaagcaacttaaaattctttatgtttacagtctgtccatgataggtaacatatttcgattttaacaacagttttatcgattgaacatattctttcattctgattaatggtttttcaaatttaatcccatgaaggttctctactaatacagaggtgctggtaccaaggcccaatatgacacgtctattcgagagagtatccagcgttattccgcccatcccaatagttgctggggatctagaatagatgtttacaatggatgtccctattttcactctgtttgtaacctgggatatggccccaagagttgagaaaacttccttcccccaagactctggagcccagatggaatgaatgttttcatttttgtcaacgattgaagcaaattcgaggatttcttttaactctaataatgatccaatactatatcctattttttccttcatatttattttgaatttatccttgatagttctttggatgattcttcgatgtccttgtgggaatcaatcgatttccaaaatgatttttcaaatttttttgcttttaatttttgttcgtttgccatggcaggcagtgctgttgtttcaatgtttcctttatcaggtaagaagtcaaaaatttcttgattaaaaaaatagatacctgcgttgatccatttatcgattatatccggtttttccttaaatccagtcacaaattgctgatcattaaaatctacaatcccataggggctttttagcggaacaactgcaatagagttataatcgttcttataagataaggtgttaaaatctatattagttaatatgtcgccattaatcataaagaagccatttttttcatcctttaggagagatcgagtgtttttcagcgcgccaccggtccctaatggttcttcttctaccatataagcaactttaaccttaaatttgtttccacttgcaacatgatttatgatttgttctttcaaatagccaacgcaaatgataatttctgttatattattcttagataatagctttatttgccattctataatgggcttccctagaatttctatcatcggtttggggcggttatctgtgatcggtttaagcctctttccaaatcctcccgctaatattactcctttcaaaacaaactaactgatttgatttaaaatatattttttcctatttacgactcgaaaaaggttacctataataggaatttatatcttattcgttcttttataaatacattatatcataataatagtgttattactatgataatagtgttattactatgataatagtgttattactatgataatagtgttattactatgataatagtgttattaacaaaaagacaatatttcataattcgaattatgaaataacattgaaaaaaatttaatctctaattaatttggcaatatgatttaaaagttcacagatttgttcttgggtatgattagtatttagtgatatcctcaatcgtgcttcatttctctttacagtaggatatcggattgcttgtacaaagaaattctgtcttaatagttttttcgagatcttccaaagcttttttttcagacccaattaaaagtggaattatgggacttctttcgactttacgaatgataattttttgctcatttgctattttgtagaaataatcaatatttctgtacaactttggctggagatcccctctctttgctaattgtattgacattatagctatttcggccaagtaatccggaagtgcagaggtaaagataaatgatctggatttattaattaaatattctcttactaacttcgaacagctaacatagcctccgaaacaaccaagtcctttgctcagactactaacatggatatctaccgacttgttaaccccaaagtagcttggggttccgctacaatccgttaacttgctattacctataataaaatctccatgtgagtcgtccactattagtaaacaattatttttatttgaaatgcgcacaatttcaactaagtcggccatatcaccattcatgctaaaaattccttcagttattattatttttcgtttgttaccatgtttttttatattcttttctaattcaatcatattattatgaggaaatggataaattttgcttggggacatcttgcatccatctattatgcttgcatgattcaattcatcactaaaaataatggtctctctatcagaaatacatccgagaacccctaaattggccatgaatcctgttggaaagagcaatgatgaggcagttttcctatgctttgagagatctttctccagtttttctaaactttctgtatttccactaattaatctcgaactacattgtgatattcttgaagtatgcaggttctttaactttcttattaaaaatgtgttcttagataatcccaaatagtcattagatgaaaaattaattacggtagatgcatttgttccttttcctgattctgagattttttcaatagttcggagctctctgtatagatcctccttacgtaattctcgtaacttctcttgaaaataatgtgaattacttttgcctgagtccaatctcttttaacattctaatatcctcaagaggtttatttccttttgtggtcaagtatcctccactaataattccattagcgcctgcttttaggacttttttatcattctttttaagatgaacttctctcccccctgcaatttttaggattgttctaggcattagaaagcgataagttgcaattgtcctaattatttcctcttcagaaattgaaaatttgttaaagagtggagtgccctctctaccaattaacatgtttataggtacttcgtcaggattcaaagattgtaaagaaatacccaattctatcctttgttcaatggtttctcccatgccgatgattccaccactacacaactccaatccaacttctttgacaattttagcagtgttgattctatcttcgtaagtatgggtagtacaaatcttatcaaacatgctcttggacgtttctaaattatgattgtatcttttaactcctaacttctttaatatttcagctctttttctagtcataaaacctaaagatgtattaacatctatgtcgagcctttcctttagcaactttatagtattgcatatttggataaagtcctgttctgggggagctctataagcacaaactatacaaaaactattcgccccattatcctttgctgcctctgcctgtgccaaaatcaactctggggctaatagtggatatttttcaattttggtggtattaaacgttgattgtgaacaaaaagaacaatcttctggacatctaccagattttgcattaactaaggtttcgacatcaactttgtcacccccgaatttcaacgtaatttgatttgcacaatcagcgaggaaatcaagatcagcagaattaattaattccaatgcttcctgaaaattaacttctttatctgagaaaacgtcaatcattttttggtggatgaagtccctagtcaaattactcatttgataattctatttctataaagacttacttatattagtatttaagtttaccctaaatgactagtcaaaagcggaattcgtctgaactgtaataatattaattcgtctgaaaaaggaccgattttcataccgtcttagaaatagaccgttttttttactccaaattattgaattttggttcaatttttttttatatctgctcgtactaatttgactaccttttttttactctcaaatttgaaaagtcgttatgaaatatgcgtttgcttacttgagagtgagtacggaagaacaaacagtcttaaatcaaaagttggcaatgcaagggtgggctcagtcacatgattttcagatcttggattatttcgaagactcttcaattagcggaaaaacagcggcaattggccgaaagggattccaagaacttttaaaaatagtagcaatagaatctgtcgatgcagttttggtgtatgaactttcgagggtgggtcgcactttttgggatacccttgaagctattaaagctatcgaacagtattcaccattaatttcctgctctccacgggaaatttttcttcaaacaactgaaccaagtatcagaaagcttatgcttggcatactgacatgggtcgcagaacgagaaagagagttgttagttcaaagaactaaagacggcattattagagctaaatcagtgggaaaacaaataggaagacctagaaaagtactgaacactgctgacttaattagtcacctttctcaaaataaatctaaattaagaattgcgaaggatttaggaatttcaaaagcaaccttgtacaaaaatctaagaaatcttgctcctagctaacaattcttttattaatatctaaaacaatctctagttgggtgtccattatcttatttagagaatgtgagtctatggctaaaggaggaattacaataatggtatttccaagagacctgagtaggacacctcttttgagtgattcttttatcacaaaatagttaatgggtatgttatccaccatagtaatgggtttaccattgaatgcaagatcaaatcctgccagcaatcctttcgctctaacattttttacaattggaataaattgaaattcttgtaacctcttcttaagttgcttgctatttgatctaatcttatcaagcagatgattctctttgtacatttttatattttcaagaactgctgtgcagccaattgggtgtccagcataagtgtgaccgtgaaataagtgttttcgatctcccaaatccccagaaaattcttggaatatttttttggatgttaatgtaagggctaatggaaaataaccccctgtgattgctttgccaaaacatgcaatgtccggaacgcttctttggggtatgtattcgatcatatttccgagtcgtccaaacccggtcgcgatttcgtctaaaatcaataaaatgttatgttttttgcacatttcattaattttcttttgataacccgttggataaatattaacccctccagccaattgggcaccactttccattattagtgctgcagttttatccgcatttttctcaattatcttttctgttttttctagcaaaagatttaaattttctaaattaactatcccatctagggttacctttttaggactcgggattacatgacatttaaataacaaccttttgtaactcttaaagtatttgtcaacataacctactgacatcgcaccaatagtgtcgccgtgataaccatcagctattgacataaatgaagttttcttcaaattaccttgattattccagtattgtatagcaatctttagtgcggcttctatagccgaggaaccgttatccgtgaaaaatactttgttcaggcctctagctagttttaagaattcattcgatagctcaattgatttatcatttcctattccaaaaatagttgtgtgaggtatctgtttaatctgattgatcattgcttttgtaattcgattactgctaaatccccaaacattgcaccacatattagatattccatctagatatctgttaccttcgctatcacaaaaataaaaaccactgccagatctaataattctcctatttagatatttggtataatcatgcatttgtgtataaggataccaaatgttgtcactctttgacaaatatagtttacctattcttgagttgattaataaattccttatccttatattcttgaaatatatattgaaagcctattaatgtacagtgctaacctaatggagttaaaggagttattatacttaaagatcgatcaacttggaatagattttattaaaacgaaaattaaagaaaacattctaaattcagattacataatcaaacaattacttaaagaatgtattagttcaagaggtgttcaaaatttatctcattctgactacatctccttggctgaaggtttgatgcattatttacttgcaatcactataacgccatcacaaaggaaaattagtatcaatcatactgaagtaagcattcttgttccgggtgctagagatttaaaaaatggtggtgaaaaagtgataattatccaatttttaaaaggggacgaggttgaatatgagcagaccattagtgagttgttgaaaatgcagccaactcgcgataatatttggttagtctcatactgtcctatagtaactaggtatccacttaggaattttgtaatcgatggcgagtcaattggaaacaaggagcttgtgcagcccttttcaaaattgatgattgaaataaataactttctcgatcggattaattacaccggttttcgaattctctgagtatgatttcatgtttcataattcgagttttgaaatataatgttggtagaaaatttatgaagaaatacaagattgaattttacgcattaagatctgaatacaatgaaataagaagttattttgaacaaatacctcttgatattataatatctggacttcgattttcaaataataggtacaaagcaaaagtgggaggttacttaaatccgggacgcaagagcctagtcaaaaaggaaacggcactattgacaaaaaaacaagcccgagttagactaaaaaactggaagatcatgataaaaaaatatcgggaaagaggttatagctatcccaccatttaccggataaaaatgaggttaaacggtattatcaatgatatagatccctaaaatagtaatagctgattatttgtcaatatagagagttactctctgagattttagaatctaatccagtatttggtaaatcagggaatttatccttcatgttttgctcgacgatggcgcttgcctcttcaattattttcaaagcatcttcgcttacagcactagtgttcccatttatatcagaagttgttggtatttgtccagaatcattcattataccatttaatatgtcggtgatctttccaaatgactgtccagcttctggtatcattgaatttaatccaccttgaatattctttattactgacatagcagggctcaaagtaacaacgacatcacctagctcggtaatagtattcaatctgagttgaatttgttccaacgccaattttgctgatgtaatcatcttattcattttcctgatttgtgataattcgttagataggattttagcatattgactatcatgattctgcattgcactaataattctcttaaatatgatttgatctttctcgtccatctttgctgacatactttccaattttgcaatctgagagtgtagcctcttttgtgcctcttctattctaggctttaatggtgagggaggttttatgttctctaatagtttcatacctacattacttatctcattttgtggtttgatccatttgttgctgaaagacatttacttttataccctctcccaatgtaaaattttgtatttaaagttgtatttttctctattcatgtaaccgaagtgacaatattcagtggttacatttcccaaggctaaaatttatactggataagcgccacaagttttgcaaaaactccccttccaagtaaatataatgttacaaaaaggacatcttttagatttttcaagttgattacagatttgctcgatcggtgggtcaaaaaattttctatatatttgataataaaacatatgctctttagttgtaattgtaactccttcggtttttgccctactagatccttcaagaaattctgcaccggtaatactattttctaaatacggtataatcttattaatccctgatccactttctaatgcttctttccttctccaagtaatctcatctcccaacatttctctaaaacaacttcttaaaaaaaattttccataaaccatgctattgtgtacagcgattttttcatttactgataatgactgactaaactttatgatagtattatcaagaaacggggttgttattcctagatcgtatttttttgagaatataattgatacaaactccatattttgaactatcttatttaattttgattgcaaaatctctggagtcttaaggtatttacccagaaagttatacccaccgaagagttcatctgccccatctcctagaataatcatatttgatttaagccttttcgcctctttaaatcccaaaagctgaactacactatttcttaggaatatcggatcaaatgtcttaaagtcccttatcagttcacgcaggttttctaagattattttcatagatggcattacaatgtgatgatttagggcatatttctttgcgattaaggtagaatatagataatcggaacaattttgatcgatagatacagttatggcttctctcggatgcatataattaagaaggatactactatctaatcctccagatagtaatatagacccaccatgggatttcctgcatacgttttgcagaagttcttggaattctttatatgaatttagcaaacattaagatatcgattttacgtttataaatctaaatcgttaaaccttaaacctgaatggaatttagagcaaaaaaaaaatgtattaatccatcctgcgggatagaatattccatagataatgatatttatcgttgctcttgcggctttcttctagatataaaatatccagatgtccctaatagagaattgatcgaagtattttatcaacgacgtaattttggagggaatattttcaatgaaagtggtgtatggcgatatagagaattattaaattttgttgacgttgacactgagagcgtgcaagattgctccaaattattagtatcactggatggttcagaaggtagatcttcaaggccataccaaatgagtaaggttgcaaagtacgtcaatttacccaataacaatttattccttcaacctgagggttataacccgagtgggtccttcaaggataatggaatggctgctgcagtcacacacgcaaagttattgagtgtcaaaaaaatagtttgtgcctctactggaaatacttcggcatctgctgcaatgtatgcctcaaatgaaggatttgattgtgatgtttacatcccccgaggtgaaatagctcccggtaagcttggtcaagcctttcaatttggcgctcaagtacttcaagtggatggtaattttgatgatgctctaacactatctttagagatagcctcgaaagaaggtggatataccgtaaactctttgaatccatttagaattgaaggtcaaaaaaccataatttatcggataatggaatatcttgattggaacccgcctgactggatcgtataccctggaggtgctctaggtaatatatccagttgtggaaaggcgctcattgatacgaatggggttggataaagaagatacctcgcgttttggtcttaaatgctgcaggagcaaatactttttatcaactagtaaatgggttgtttgaggataccaaactaaaatggaatgccggaaaagttaatactgatctaattgaccgattctatcaaaaacagcaagaaaggaatattatacctaagacacaagcaacagcaattcagatcggaaagcccgctaacatagttaaagcattgagaacaatcgagtttaccaatggcattgtagaacaggttcaggatatagatatgatggatggaatgacaatagtggggttgaatggatttgattgtgaaatggcatcaggatctgtgcctgcaggaataatgaagttacgcgaaaaagaatttataaaaaaagatgagattgttgtaggggtattaacaggcaggcaaaaggatccatcaattgcaattcaatatcatttgctcaaatcaaatacatatgccagaccacctcgcgaattgattaattgagatcttggtatcgatttttttcaaatgcctttaatgctgagaggatagcatgggatttatcttcagtttcttgatattctttatcgggtaccgaatctattacgattcccgcaccagactgcgtaaatgcgttctttttattaaaaaagatcgaccttatggttatagcaaaatcgcatgattgattgaaggaaaaatagccaacagctccagcatacggtcctctacattctggttccagatcatttatgatttccattgctctaattttgggagctcctgaaattgtacccgctggaaatacagctctaaatgcatcaaatgaatcatattttttatgtaggatgccctctacatgagatactatatgttggatgtgactaaatttttttactttcattaattctgaggtaataaccgatccaaattgacaaacttttcccagatcatttctcgctaaatccaccagcatagtgtgttcggcaatttctttctgatcttttaacaattctcttcgaaggagttctgtaacttctttatccaaaaataccggtcttgagccagcaatgggataagtttccaccagatcccccgttatccgtagcaacatttcagggctggatccaagtaaaatcctatgacccgttttataataaaacatataaggagatggattgatcttcctgagttcctcatacatttgtagatggtctccagtaaaattgaattttatcttctttgacaatactgtttgaaaaatatccccagcagataggtgatccttgatctgattcactttgttttcaaatgccttctttttcatacttctctttggcagtgaaaatgttgagttatcttttcttgatattttagttttgcttttcataatctttttaatagtatcaattcttgatttatcataaaaaaaatattcaagtctctttttcatatgattgtacactaaaccatcttcaaaaaacccaaattcaagaagagggaatgatgtcttacttttgacatttattttctcccaatattttattgcctcatagcaaaaataacccaccagccctccaacatatctataatctttattgttgattataggaaaacaatttttgagtgtttcgagaggatctgtgatcgaaattttccttagaatcctatcatttttatatacccataacgtattattgtcgcatttaattttatatttaggaccaaaacccataatagaagattctaccaattcctgaggtccttctaatgattcaaaaataaatatgtcagtgaactcatgacttattctcttgaatatgtcaaatggatgcatatttgtttccaaattaacaaaagttggttcaatatcaatcttgaagagtctgtctaaatcatttgacacaaaaaatccctatctaacgtaagtctgctaaatcgtcattattaaaagtgcccttaattgaaagtggttttctacccataaatccttcatttttaccatgccaaaatttaattttatcctcacctattttccagcataaccatacttcctcgttaaaacgttttgaagggaaatctaaaagaccttcatcaaaactcttaatcaaaatacccaatccttcgaggtcctcgatatctctatacatttcagttattgccctattaacttgacttttctttatgaaaaatgactcgtgtgacaattcttgatttaccactgaatttagttcagcctgaagatccattatgctatttctctgcatcaaaatattagcaaacttaacctttatttctggtagtatcctgttagctttgaccggagtgaagaaattaaacatgaagatgagttaagtcaataaatatttatttttatttattaatctagtattgatcacttcgatacaggaacaattatgaattaatattacaattactcaactgaattgaaatgagtaaaattaaaaacaaaaataccattgttagatatcataattgtaaatcattaagtgattccttaagggctttggattatgctttcaaaaattctgatcctgaaaggctcgttagcgaatctattcaattaggttcaaatatgcaaattacggatataaataataaaatacacaaatttgacctccctgatacagcatcgactttggttgttagtgtaggcaaagcgtctgaaaaaatgcttggtggattctttgataaaatgagggatagaattaagaaaactatattgatatcccctgtcggatatgtacttgaaaaaaataattttgaattattgaatagttcaacagtaattcaatcatctcacccaattccaaatgtccaaagcaccttggctgctagaaaagtagttgaggaattacaaaatagaaaaggtatacaattaatagtctttttaatatctggaggttcatcttctctaatggtatcccctattgaggggattaaccttatggacaagaaaattattaataaattgcttataacctcaggtgctaatataagagagataaatatagttagaaagcatctttcaagaatcaagggtggtaaaatattactacgaattgatcctaatactcctgtcatcagtttgattctctctgacgtagtcggtgatcatctcgataccatagggtcaggattaacatcatcagatagaactacatttaaacaggcgctttctattttgaataactatttcatcttagatcgcaaatccgaatctattagaaagataaaagtcgtgttagaatcagggattaggtctgaaataccagaaaccttgaaaccaaaagagtttcgttcaaggaacgttactaacatcattatcggaaacaattcaaatttttgtcgactaattcaggaatgttttaaaaatcaaggttattccacaaattatatgggatctaactatggaattcctatgaatgatttcattaagattgcatccaagataattaatactaaatacgagccgaaaacatgtatcattttgggtggagaagtcaccaatacgttaccaagccgtaagattggaatagggggtagaaatcaagaagcaatttgtcacatgctgcaagtaattaggaaatgcgaccttcttgatttttcctttatttgcataggcactgatggtattgatggaaactcttcttcagcaggcggcttcatcaccccaaagactatcgaactgttgaaaggtaaaaaattagatgttaattactatcttagaacaagcaactctaatgtattactcacaaaattacgttcaaatatagacactggctatacaggtgcaaatttcaatgacgtttatctattcgtccgaaataattaattatggtttctattatccttgcctaaatggtccattctatgggaatatcttgatatattccattcggaagtattctccttatagaaattggcaaagttttcttttccaattcgtatttagctatcaggatagtatctgtaaattctggtggtatctttgttagaatgggtgcccccaatgacaattgcaatgaacgggcacctgtaatcctagctttttcaaatctagttaaccgaacagggccaattaggatttcattattcttagatggaatctcttttagtctaaattctacatcagcgtcataagttttgtatactattactacgcttggctcttttccctccacttcacttcgtttattatctgaaccttctaattgcaaattatcttttccaccgtcatcaattttatccatatccaaatcatcatccttcaccgtacttgacttcttttttgctcgcttgacagccactactaaaaaaaaagatcaatatatataattaaatgttgctgaaagttcatatttataaatcttttattgatatctgtgtcatcagagtttcaaagtgtttcaacaataccaataataatagagttaaatcaggcatttcaattaaaaggtgaattcaaaagacatctttcacccttaactataaagaaactgcttagtgcattccccatatctggtcgaattaatagctatgatggtaaatttgtttatgtacaggtggatctccagctaggatctgaaaaacccatcaacattttcaaaaaaggtgatttggcattttctccattaggaaatttcctttgtattttattagatgatgctatattaaatcaaaaactgaatttattggggagggttacctcagataatgtcgatatattaggatcttttaaagtgggagattatctgagccttaaaaagtccatgaattaaaaattgactactttaacttttgatatatcctatgtccgctgtagccccctattgattttatgatgctcttgccctctaaatttttcaagaaattattagcaaccgaaattttcacacctaatgcccttgcgaatgaatgagctgtgatagctttcatcgagtctagtgtctttaatccctgagattcttcaatcaataccgagagtttttgtttctgctgagttttagaagctggcgtcttttttatctcctcttttttacctcctttattctcttgagatttggaagcattcgactggcttggctttttcttatttccgcccattgttaaacaaaatttctatatacgcagaatatttatatctttaagattggctttactttgagtgttattctgaaacatgtgagaatatccttgcatctattacgtatagttacttctgttactccagctaatcgagagatatccatctgtaatatattaattccaagaagaaccgatgcgagatatagatatgctgctgcaataccgtttggagatttgccatctgaaagaagatgattttccgtttttttcgctatctcaatggccagacgctcaattttaacatcaaattttgctgtgttagctaatttagaaatgtactgattgatgttgattgattgcatgtttaatatcgtaaagctctgcttgtttttatttccggcccttggatcttgctgcataaaaacagtaattttgttttgggcttgaattgtccaatcggtatcatcgttttcgcaaatcaataccatcgaacgatagtatttcgaagccaatttcaaattttcgtttgcatcttcggtgttaccattatgttgtactatctcgttaagagatctaaggactttacaaattttgcatgcataataaatagcagctgcagccatggatgctgaagattttcccttggtatcgtttctattttcataatttctgtaaattaatgccgctgtttcacatacaactttaggaaacgacatgagcgaacaagtctcattaatctttgataacacatttgaaagtctcctgtctttggaatttgagatccttattatattgttccatttcctaagattgacaactgactttctgatatcatcattgaaatgtcggcccgaatagtctttgcattggttatcaatctcagtatgaagaccgtaatcatggtacgcaatactgtttacaccactagctctcaaattattcgatttatgtccggggtcgctaatataagcatctggaccttgatattctaaattttcttcaaccacatagccacatatactgcatacaaattcaccttttactgtatcttgcaccaggtttgcatgacattcagggcattcattcaatagatctatatcattcgaaaccatttatgtcacctatttcttattgttcttaattttcttcttatttttagatttgaaataaaaatctttttttcctgtaatgggaaaatacactttcaaacctgccatcttactcttggcttgaacaaagggaattatcgaggcatagggggagttcactgacccaattaattcagcaatcttgcctaccctcttatctttattatctaatactatcaacccagatttcacatgtgcaccattattctctactcttactatcaagcgaccgctcttagaaaaatgaagtatttctcccagcaattccatagtcaaaattcgataatcattattacttacatattcttctgtcaattaaagctatcaaatctatcaattattattatttagtcatgcatataggtcatgacgggatttgaacccgcgacctaaggtttacaaaaccttcgctctgccaggctgagctacatgaccatgattttattatcaattaaattctgtaattaaaagcttttgtatatatagtgacctctttttttaaagatgtgtatatgactgaagtcaataagaagaaaatatttaccgttaacgtgagcatcgaaaacaaaccatttctcaatgatcctgaaggggaaacagtgctcaacgatcttattctcaaagaggactattccgatatagtttcagtcagatcagctaaatccctgcgtatcaaaatcttatccgagactgagaccgaagcattattcaaagtaaagaaaatgtgtgatgatctgcgaatttacaatcccattgttagtaattgcgaactttcgattaaggaaatccaaaataaataattatttttgcattaattaattaatataataaaacttaaaggttagtaagaactttttttatagcaaggcatttgaaggattatgaaaatgttatcatctgggtggactattataataaaaacttatctaggggaaaaggtagacggatatcaaaatcgatggcggtctacgatccgatgataacggagttggttgccgccgcagaatcattgggatatcaagtcgaaaaagatcagattaatgatggtgcaaggtttcctaaaagaccacacatcaaatcagggtatattatgatatctaagaatgaattactgaagaataagatattaaaggatattgctgaaaaaatagttctaaataggacaaaatcaaaaggcaggtagcttcaaactattagcaaatacatattaaaaacataaataatcaatagtagatagaaaatacgtctgattttttacgacatgttaaataaattaaggaaatatataataaattgacccatgaaaaaactgaaaaattcactttacgtgaaagatcaatagccttgaaagaacccaatgcagtcataaaaggcgataaaagtagttcgccattatcatctccaataaattttgaagaaaaattggaatctcaagtaatgcaatctattccaaaagaggctcagataacaatagttaggtgtgaatccgccaatattgccctttatactaagaatccgtcattcgcgttaacagaattaactcttcacctgtcagccctttcaaaatcaatgaagaaaagattcataattagaacagacccatctataagactttcagaggatgatgctcgttatgccattaataaaatattgccaaaggaaattctgataactgtactcttttgtgatgaagctacaggcgaggtcattttagaagtaaacaatccagaggggataacttcagaaatttttttgcaaattgcgaaggaaacaggctggattgcacatacaaggcggtctcctcatatcccttcaaatagcataaaaaatatacattccatactgaaaaattcctccaaagaacgcattaccttttatcaaagtttagggaaaagaatttttagacctcctttgttgtccaattctttactatataatggtgataccaatgatgatatgaggttaacctctaataatcacaactctagatatttatcaagaaaatcggttgatgaaggggcaacatatcaatacagtaatctaaaagaggtcacaatttactgcttaggtggtgttaaacaagtaggacgatcatgttttgtcgttgtgactccagagagtaaaataatgcttgattgtggtattaatccgggagaaaacataaactataatgcctatcctagactagattggtttaatttcaatttagaagaattagatgcagttgtaattagtcatgcccatatagatcatcaaggattcttaccggcaatattcaagtatggttacaatggtccgatctattgtactgaacccactttacctttgatgacgctcttgcaaatggattcggtaaagattgcacagagcaatggctcgtatttgccttatgaaatcagagacgtcaatgaggtaatcaaacattgtattcctcttccttatggaaaaccgactgatatatctccagatgttacaataactttaaataacgcgggacacataatgggtagcgcaacagtccatataaatatttcaggggctcataatatcctatacacgggtgattataaatacgcaaaaacgcaattacttgatggagctttggctaattatccacgagttgagactattatcactgagagtacctatggtgcaagttcagatttaatgcccgatcaatctgttgtttataatacatttacggacagtatcaatcatacattaatgagtggtggcaaggtgcttatacctgtccctgctgtaggtagggcccaggaaataatgttagtcctagataaagagatgcgagaaggtcgattggtggaatctccaatattcattgaagggatgatatcggaggcaagtgccatccatatgtcttacgcccactatctgggatatgaagtgagaaaatctgtatccgaaggtattaatccatttttatcttcttactttacggtaatcaatggaattggcaaaagagaagaagtttttaacgatgattctccttcaattatcatggcaacttccggaatgttagaaggaggaccgtcggttgaatattttaagcaaatttctcctaatcctaaaaacaaaataattttcgtgtcttaccaaataaacggcacccttggacgtagggtgctggacggtactatatctgaagctagcatgatagataagaatggcaaggttaaagtaattccagttagatgctccaaacaaaaaattgacggttttagtggtcacagcgattttaatcaaattctaaactttgtttcaaaagtgagacccaaaagggttttggttaatcatggggaaaaatctaaatcagagaatattgcaagtgtaatttactccaggatgaaaataaggtctagtgtccctgataatagggaaatcataaagctaaggtaaattgcgataggttttttcgtatgtatgatgttcataatgttgaactgatttggccataagatatagatgtattaattgtaatattgtgttgagcggagagggtgcctcacgacattatttagcaaatcctaatcataaattagaaaaattaccaccaccacctaaacctggcaagccgactacttaaaaatctgtaagagtaattattctcttatactttctaacgctgatacaacttgccataggctcgtcctgatatgtgattgcatttgagggttttgggtgacaccgtctaacatactaatagcattagcagctcgcactgatatacttcctcctttctcatccttaagaatagccaagacctcccttatcatattcctaatatttctttgaatgtttacgttttttattagagaatctaatgttgatatcgcattatttagtctctcaatattttctttttgttttaattctttctttgtaactgtcaatttgaatcacacaagttaaattttacctatttcatattaatagctttatttgtatgatcacataatatcatgaggtgaaaaattttaatatgaatctcatcaatagtccatgtttgaaaatgggactaatcgatgaataggacacttatgattataatattttggattttagggtttatcggaggaatttccatttattcaattttaccatcaatattaaatttttttaattctttcatacctaatctattttccaaatatttcttagaagccttgatcgcaggaataatagggtcagggttaagcaccatcgcggtactctattgggctaacaaatcctctaaagaagaattttgacaaaatgatcttcattatatagccgcaaataagttattacctgtatacatggtcattgatgttctagttgcttttatggtttctctagctgcaggtctaattggttcaatggtcggcataggtggtggcataataaatgccccttatcttagttatcttaattataacccatctcaaatttcttcaaccagtcttattgcagttttttttacgagtatatcttcttcatatcagtatattaggaaagggttgaccgaaaaaaagatcggaatgatcttggccatatcatctgttcctggaacattcattggtgtttacatttcaaattcctttactttgaatgagtttcgatactatttcgcgcttattttaatggctacctctctctatttgttatttcgatcaaaaattttaggccaagaaaaaaaaataccgaatttttttcaaaaggaaaacaattggaaatactctagattattgatcttagttattttttctttcgtggcgggtactttgtctagtagttttggtattggaggtggtatcatttttgttccctgtttgattattcttttaggctttacaatgaaaaaggcttctgctacttcgcaattcgctctcatatttacgtctctttcaggcttgacattgtttatcattgacggaaaaccgaacttctacatgggattcattctatctgttgggtcgatcattggtggtaccttaggcagcatgctaaccggtagaatgaaatccgatttattactaaaaatatttagtatcttattgctggttgtgtcttttaaattgatttatgacggatcaggttaatctgactgaaagtttcaacttgaagttaataaaatctcgtgaataaaatgtagaagtggtttaaatgtcaagctggtccctgcaataatcgtgcatagatcttgcttttcttgattaaaggggggtattcattcactaaggacatgtgattacttaccaattaatcaactatttaataaatactaattttaatactaaatgtttgttgaattgataaatttagctataatgatatctggtcgtggaagtaatatgaaagctattcttgaatcaattaagaatggggaggttgaaggaattgataatatattagttatttcaaataaaccggatgcattgggtttagaaattgccaaaaaagaatatggagttatgacaactactgtatcatcaaacaaaaatgatgagtcatttgaaagccgattatataatgagttaaaaaaaaataatattggtcctcatagcggactaatttgtcttgctggattcatgaagattttgagtccgtcctttgtggaattgtacaagcaaaggataattaatgtgcatccatctttgcttccatcatttaaaggtctacatgcacaaaaacaagcattattggctggagttaagattacaggttgcactgttcattttgtagacaatagtgtggatagtggaccgataatcttacaatatcctgttccagtatttgataacgatgatgaattgacactatcagaacgaatacttgtcaaagagcacgaaatatatgtcagggccataaagttgcttacccaaaaacaaatttcagttgttgataaccgcgttattcaaatttaaatgtaatctaaccccttatttttttgtccatatccagcatgaattttgaaatctcttctttattcaagttcaagtattcctgacccctttctctcaacctgctgttaaacagccgtaactccctatgttcttcaaaaaagttttctagaataaacgttccatgtaggattgggtttaataatttgtcaatagcttgtacaagtgaattcaagtcacctctatctgaaaattctgaagattcatacagtattgcactaatatctttcaattgttgggtagaaaagaaaacctctttttttccttcaaggggttttgattgtgtatttcgtttttcaaaacctatctttgatatcagttctttggtaagttcatattgttcatctttcccagtaaatgtttttttgacgtttttaattaataggcccttattggctaatctggttgttgcttcctgaatttcctccctatctaatccggtaacccatatgatcttccccaaataatcattcccctgtctaacagattctagaattacaacctcgataattcttttataatcttcctccattctggcattaatgaaatctctgtctttcactgctttttttgcgttcgcaatatcaagctcaatggacttctttaaagcttccatgcccttagttgcccttccatccaaagtcatataacaggcataattataccatgccatggagtcgttaggattaaagtctatagccttttcgcagcactctatagccttttcgtaattttttgattcgtaaaatactaaccccttcatgttccaaacttcaggattgttgatatctatctctaatacctgatcaaagatggtgatagcgagattatattgtttcaaatgaaaatgtgaatagcccttctttatcaaggcgtccatgaaaaacggatcaatcctaatggaaagatcaaaacatctaatagcatcttcaaatttttcctctgccatcttgtttactcctttgttatatagattgacttttttaatgtcatcttgagttattttgtaaccgctaggagtacgggaagaattgtcatctttcttatctgataaaagtttcctcccaaaaatcttttccattataattaataatacttatcaagaataaatatatttatttttttaaaaaaagatgctaacatcctaaaagttgctcaaactagaatgtcggaatgctagtattggtgacctttgctataattccactgaatgcaaagttaaccagcaaaaaccagccccagagaaatacctgaccagggactttgcatggcccttctttcaaatcagtacctagtactatttgtagtttgaacagggttatcaatttttacattttcagcagaacaagtcaaatatggtattacgatgggcgatagagcaacagtttgaccaaatatcgcgggaaaaacaaatatccataacatgaaggatggtatcatatataacatcatgggtctcatttgttgttgctgcatttccatgctcattttttgcatttgagattgtttcttttttagttcttcaattagttgtttatcttttttcttaatggcttcggtgtatttttttctccattctcctgtttccttcatgactgttttcattttttctatattggttgtctttcttctcaaaagagccattgctaaatttaaaccaatagcaattatcgcagctacgatggcagatgtgaacatatcgggaaaaattggatgttgagtataatgtggtgttaatccaggaaattgtaaaaccaacttttcagaccaatcgaaaagatctatcaatccaaaagaaaatgattttctgggagttattaatctttttacttgatatcagattacattctcatcaaaggagttattcctatgatgttcatgcatatctttagaattttcagggtactatttaatatcaataccctgtaagttgccagcacttcatttttctccttcaagattggtgatctttcataaaaattattaaacaatgtagcaagttcaaagagatattttgaaagcacctttggatctatgttattagcagcgtgcataagttcaatatcatatctacataagtgtttaatcaattcgatttcggtagaagaaaaatccaaaatctcaatattattctcaattttattcttcttttctgagaaactttcctcaatatttttatcctcaactcgcttacccctcgcataagcatattggatatatgaggcagtatctccttcaaggctcaaggactcgttgatatcaaaagttatcatttttccgagatcaaacttgatgaaaaaatatctgattgctgagattgaaatctctttggatataaatgcaatttcttcttcggagagttctggattcctctttctagtttctacttttgattctttcttcaagaatgttcaaggctctgtctgcctcaatatatataccttttcttccagacatatgtaatgaattcttatacttttcagaaatgcccaagctatctagagaactttggctcaaagtgacgggttcataacctaaatatctatactttgaatccatccctaattttcctaatatctctgataaaagattttgaagcctctcttgccttgaatcgataattgttatgaccttacttattctattaaagtcaatcgttaatccgttatcatgatccgaataggacgcgtaagtttcatttggaattttcttaatatttgttctgtatagaatagaagagtcccattgatttgagtaaaagacataatcaaatggatttctcaaatagcccaatttccaaactgcaaatggaatatctttagcgaaatatgttaaagtagtatcacttctcactaataccttatctccttctgtttctgacttgtacacccaacaacctgcattttttccaaatttttcatgatatattatttctttatctctcaaaattgaaaaaatatcagtccaaaggtctgattggattatttgcgactcaaaacataataaatcataacgacatctcaaattccaacaagttttaagttgatcccttaaaactctatcaactatggtctgggtgaagaccgaagtctccgattcaggattctccaattcctttagaaccgactttcttttaatttctagatcaggcctactcttgtatagctcatttgttttgacgtaaatttcgtttccacaataatgatcaaattttgctttttcattcgataatctttgatcatccattctagtagagaatcctgcatgtttgaatcctacaattatatcagccacttgaacccccgaatcgtcaatgtaatttaagaccctgacatcttttcctgctgtacgaagaattctatataagcagtcccccataatggcgtttctaaggtgtcctacatgtaaagccttattaggattcacactagtatgttctattagtatcaattctttcgaatttgataagttcttgttttcatgttccaattttggattatatactacctctttaaagaattccattagaaacgccttattattaattctaaaattgatgaaaccgggatttacgaatgaaacagactcgatcagaccatttttattcgtcaagatgttacttgcgggtaaaatagtatttacaatatgattagctatctcatgtggcgacttttttaatttcttggctaacaagaaacaaatgtttgtagaaaagtctccaaaatccttcacatgtggtttagatatttcaaaattgacctcagactttgtcaagttgtaaaatgttaatactccatcaagagattggccaatttcattgataacattttctagtatcatgcaaatcactaaaatacttttcctctcattatctgatcaatcgcatttatcaacccttctccattcgtgcctccaacaatatgagttgcactttttcgaacattctcaccagaactttcaaaagtaaagctaaattttgattgcttaaacatagggatatcagtttcactatcacctattgcaaccacctcgtcgaaatcaatattgagatccttcaataggaatgctagcccaaatcctttgttgattttgacttcattgatatggaatgcataattactatctactattttcaaatccagttcattttctctcaagattttgttaccctcatttaactcaaatgttctttcaagaactatttcagtcattctgggaaaaacaggtttctggctaactcctttaatgctcctaaccaatagatcgaaccccttcaagcaattatctttattcgctaataatttgtgttctacaggggaagtagtgataaccccaccgttttcccctatggcaatttgagtcgttccaccatataccgacaaaatgtaagcctctagggatgttctccccgttacaaaaatgactttatagcctaatttggctaggtatcgaagtttagctaatgcatcaaggttcagagctccattgccgtttaatgttagtgttccatcgatatcgatggcaaagaattttatggacctcaaatgaattcaagctaataacgaagttacataaaaatctaaatttagtaatacatatattgaatataccatgacagttagtagaatagtttgagcttggaagtcgttttgttagaagataataacaatatattattaaaaagacgtgagattaaatcagtaataaagaatgctattgggtctatcccgagggaggaagccgcaagtttaatagctggaaagatgggcataaataagaaaaatcttttaccaatttctttaaaaagtgaatttggtaaccctgatgtaatgactttgatgtattattacgatgatatagaagaagcaaaaaagcagttacctcgatatcgaatcctcagaacgatgacaaaagatgaaagaaaaaaaataatagatgaggaaaagtcaattaaactaaaagcaaaacaggcagcagcagcggcagcaaaatctaaaaagaagtaatttgttaacacgatagagaggggagatatgcaatgagtaaagagaaaaaaggagaagtaagtgtttcaaaattttataaaattaatgacgataaagttgagcgaacaaaaagggagtgtccaagatgcggtaaaggtgttttcatggccgtacataaagatagactaacatgtgggaaatgtagctatacggaattccaaaaggaacaaactaaaaaatcaaaacaataagcgtaattcaaccaaattttagaattgcattttttaaggaatcttctaccatggtgttggccaaagcagaaaatggcagctttataaaattgtctccaatcatgattttttgtataggtagttttttcttaatccaatatgattcagtttttttgtccaattttgaatcattgaacccatttgcaaatcttttattaagcaatttctgaagatgacgatctcctttaaacactttagccgaatcaagagtcttttcattgtcagaaaatgaattttcatatagtgtattggaaatattatctgatgctacctctaaatttattatatttttcaatatattcaaatagtgtagaaattcatgggcaagaacagcgtgaagagttcctttcaaaccgtacattaccagtggagcggaaagttggataactatttttattctattttcagtagtacaaaatggaattgtcctggcatataataaggaatattgctggtattcaatttccgaagttgccaccagtagattaggttctataaaatagtagggatattctattgaggttatccgctcgattctatttattccctcttcaattaatctcatcttgtcaatgatgagatgataggtcctctcctcgaccttcttttctactaaatattttttgactaatactaagggatcaaaatcattcatcttatttcatttatcatttatataaaattacatcattaatatcaaaatatatacattcgcactttgtctcgagggtgttagaaagacagggttcaatgggttcgttacctcctacgaattgttttatgggaattccattatccatatctaaagatatttcaagtttgtcgcattctacacttactaactttgcagcgtagatatttcttgtagtttttctgttcttgactctgaatgtcacctctccggttagtgtctgcacgagacgctgaaaatgaccaaaatcgcgaactttctcatttaatttgacgaatatggtaacaagtattctgtatttgctatagtaatcgatctcatcatggttaatctttttcaaatacaattcaacatccttctccaggacttttttctcatccgagccttttattttaggattaatcacttttacaatgaacggtcttccgctacctagaaccaaactatatttatcttcgctaccagtccaagttattttcatatcctctgcattatattctgaccaaacggattttctgatggagtgttctatcgattcctcttttctatctatcaatttatgaaaggtttgagaatccatttttatccaatttttatccttttgggctatgcctctgtccaactttatatatctcccaagaagatagaattctctcgctttacaatttatgttaaaactcaagtcattttcaataactacgtcaaatttcaattcgggattcacgtgatctatagtacattttttgttttttcgtattttttctcttatcaataaattagtttgagtttttatcccagtagtacctttaatttggaacatagatcgtaaataatcctcattctcatagaagaaaaagggaagactcgttcctatatcaacaggaataatgcatgtggttgaattaaacatttcagagtttgatatttcatcaactatagatggtaacgttcttagaaagaaatttctacaaatatagcaaactttcataccagttcttattatcttgacagaaattgtatgctttactaaacacattttatttttagaaaaatttcgatcatagcaaaaactacagagagggatctgaagttgatttgagttgttcaattttttacttttagagttttcaaattctccttgggtcttaaccaagcccgaatctccttaaaagtccttgcatctgacggcctttagcttgtttcatcatagtcttagaattgttatactgcttgattaggtctttaacatcatgttccattactccggaacctctagcgattctttttctcctagcctcgttaataatatctggattctttttttcgtcagtagtaaaggattggattataaatctccatttctccattttttgctgcaggacatcaagatggtcatcttttacaaagtttgatagccctggcaaattctcaattacgtttcggaatcccatttttcccatgttttccatttgagcataaaagtcttcgatagtcattttgccactcataagcctttttgcttgattttcatcagattgaatttctaaattgcgtgccatttcaagaagggcttttatatctcccatccctaatagcctgccgacaaagctagtaggggaaaattgctccaggtcatcaattctttcaccagttcctatgaaaaggacctttgcacccgtggcagaagaagcagctatcgccccaccccccttggcggtaccatccaatttcgtaataataataccgctaatttttgcattctcgtggaaaatctttgcctgattatatgcttgctgtccaattgttccatcaataataagaaatacttgatcaggtgtaactatggaatacatgctccgcatttcttcgagtaatccttgttcctctttgtgacgcccagcagtatcaataattatgatatccactggttgatggttaaagaaagccagtccatttttcactatttctagagcatccttgttaccatcctcaccgtatacttgagcattgatcttactacagttcattttgagctgagttaatgcaccaggtcgccaggtatctgccccgattactcctatcctgtaaccatgttttgaaagccatcttcctaacttggcaataacagtagttttcccgctgccctgtatccccagcatcaaaatagtattttttttatcagaattgaagttaattagattttcatcggttttttttctatcaatggtctttattgcttcaccgctgtaacccagcatttttgataattcgccgtataggatggttatgatatggtcttttttggacaaaccctttggaggggcttcctttagggatctttccttgagattttttgttatttctaagactaaccgaacatttacatccgcagctagcaatgcgcgctggagatctttacataactcattaatcaattcttcattaatatctgaagccccaactattttctttagggccaatctcaaattatcttttagactatcaagcatggtctctacttttctattaaatcaatatctaatatttcaaacattcccctgatcccatcccatgtgacattgtggtctttaacgcaaattctttttttatatagtggacaatccaatacaagtgtctcagcttctccaccctcaaaagtcatgttaaattgatatttatgacttaatttttttaggacggaataattatcttttgtaattatctttccaagccaactactatccaaacctagtgcggcgactctagtaatcatgatttcaaatccctgtcttagcaactgttcgtaataataaccgctgtctatgttccaaagaggtgaaattaatcttaaatttagtttgtcgcaaatatcctgaaaaatatctaattgaaatttgctagaaatacaaccgtttactaatccatctattgaaaattcatctattgctgtcttaaccaaacgggttaactcattaacttcataatttttctcagaaatgttgcaggagcgctctatcacaggtacacctatcacggtagaaattttacttaacaaattagttgttggataatgaaacaaaaggctatcatcactgcatggatgcattgtcatgatgcagcataaatcatgtttttctaaagtggttttgaggattgcataggtactatctttgcctccagaaaataagcctgccgttctcaacaattacacgtattctccttgggatataatctaatagtttttataatagaatgcaatttttagttctatgctaatgctaaattctgaaataatagcaggggtggctatatttgtactgggtttactcttcttcatagctggacttttgaattcagtttgggcaattattttcatagtggattatcttataatggccattggcattgcgaccataggggttgggttttggaccgccacgtatgagaggaagaataaccttcatcatagcgaacatcatcattagtttgataaaaaaattattcatctacataataaattaaattatttttttgaacttcttgtgaacttaaacctatcagtgattcttccagtttgtcatagtccggcaaatcaccatttatgttccctgggaaaacgagagtcagatttatgttggaatttaatacatcgtgaagttcttggttggcagttgtgacatatggtcttaacgctcccctaaaaacttctgacctcgcacggacttccccacttattttcttaccaaccggcgaatcaggaccaactattacgatgtttcctttaattcctacaaataacgaagggtcgtctaatgcctggttggtagtcattgataatactgattgggtcgttatcaaatgtgggatattaacgaatttatccaccatgatgtcccattgtttacgatcaagcaaagttaatttgttgtcatagtcataactacctgtaaagtgtatggctgaatctattctaccataccgagtattgattgtattgaatattttctttactgtgttctcatcagctaagtcgatggcgtgatggtgaaatccttcaaacgtcttgctcacctctgtagattgctcatcgttttgagtaaggataattagttgttttactttttgcccgctaatcttagttgcaattcgcttgacaaagttcaataatttttcttctgtagaagccgtagtaatcaaaattgttttattttctaaagtcttgtcctgctcaatatctatagtcctttcaactattggctttaccgggtagaaaactctgtcatttggaatgacttttccgtttaataacttgctcatttcgtcacttgctaatctatgtaccatttctgctacatcatcctgagataagaattcgttatcaactatcatcttcttcgtattgttttgtaccttttctgcaatttcttgtatcttcgccaaaagttcctttgccaagagctggatcgagacaggatctagaccttcgtatttttcagctaaggatgtcgctattttctttgattcattgtcgattatttcgggctcatcgcctaaatgtggtaataaggcagatgaaatctcttcgatttgcttgtgactcagaccgttaaaaccaccaactcttaaaaattcggatgctgcttttgggtatacagttttatatattctgtctgagtggacaggacccggatttgttgcaacagatttgatacctttctcaactaattcccatgcaaaacactctgagagtctattctttgcaccctgtgctgcggtatatggtgttctaaacctataaggtctctgatcatatttgttttcctcagtgaaaaaagtggaaattgtaattatcttgccagtatggttgagtacttctaaggctttaatacttgtccaaaaagtacctgtaaggtgtattgaaacacaatctttaaactcttgataactcgaatttgtaaaaatctttactggaccagaaactccagcattatttacgattatatctatatgaccaaagtcggtaccaattttatcaaacatcttattaattgcttcaaaatcggaaacatctactcctggataataagttacggatgattcaaatttttcatcggaaattatttgttttagaatatttgacgcatcgattaaaggttctttcctccttcctaaaattataatattgtaacctagtttagcgaattttcttgccacagcttgaccaatccctgttccgctccctgtgacaagtattgttttgttactcttattcattttaatatttaatgagacttagatctcttatattaattatttatcagaatgctttattgaacgaataattcatatattttgtaaatcatattctgcttctccgttattataataaaactttataaaataagtatcatttcagagataatatagaaatggagaattatggaattatacgaaaatttacggtatcgggggtaaataattaagtgaaaataaaattcggtttgacatttggcctaaacgtcgctagattgggactggacgaaatgcaggtaattactgcagcgcaaatagcagataggactaattttgactctgtatgggcaatggatcacacaaatgtgcctcaatggaaaaacgctgtagtaaatgatgcctggctaatgttagcagcaattgggtctgtgaccaacaacgtggagttagggacatgcgtaacagatgcgataaggaggcacccctcaactatcgctctgtcaacagtgacccttgacaggataactaaaggtaggggtatactgggaattggtgctggagaggctcagaatgtagttgattttggaatcgaattcagtaagcctgtgtcaaaatttaaggagcaattggaagtgattgaaaaactgtttgaatccgatccagaaaatcatgtaaattaccagggtaattattatagccttgttgaagcttgtctacaagcaaagcccatcagaaaaccgcgaccacctgtatatatcgctgccggggccccaaaaacattagaattgtgtgcaacatatggcgatgggtggatacctataggatatactccagccttatttgaacatcatgcaaatgtcattaaggatcacgcaaagagactaggcagggacatatccaattttgaatttgcaaatgatgtggatgtttattttgctccagacggagaagcagcatgggaaaagatgaaaaaagcagtcaaggtcagcctctacaaacctgaattattgaaggttcataacatacaacaggattccgagtttgattttaggagatactttactgaatatgccatgaacaaacctgaattgatggaacaaatgaaaaaagcatctttacaaatccctgatgatgtggcaagaactgctataggagttggcagcccagatgatgtaatagaaatgttggaacgatttattaaggccggtacaaatcatttcataattcgtttctggggtgaggggctttatcaaaacatagagaccttcggaaataaggtcgttccttattttgctgacatgcaaaaataattttttttctaaaaataaatatctaatgatttagtattcggaagttgctttaatcctttcttgactgtcttgcttcctctctttatggattctgcatcataccccaatttgactaggtagttagcaaactcttcttgaaatccatgaaatgtgtatattttgcggggattgcactgttttacaacatcgagtaactcgttatgatcacaatgatcactaaaagggatcacataatccaggttcatcatgtttctgtaatttctatttattgcccatccactgaaacctatagtaattgcgccatacttttccctataatgagatatcttgggatccttgccgttagttaaaggatgtatcattatccatggtcccttctccatcaagcccagttctattgcatttgacaatggtgtagaatcttctaatgtcactccaaattgcttgtacatttgattgaacttgaatatttcatcatgtattattagcggcttccaagcgccaaacaacgatgtaaggacctgtgccttccccaatgaatatcccattaatatgactggaattcctctgctgtacatttctgaaattaacgaatttaccgaatgggtgatatgttctaatggagggaaaatgtattcaggttttccaaaggttgtttcaataattagggtttcggctttcggaatagaggtctttctaagaaatgctctatccctcatggataagtcgccagtatagaaaatctcgtttccaatcaaaagaccttttgatcctagtatatgtccagtatcaattaatgtgcagtcgtcctgataataaatttctttttcaaagatgtagccacgaaggctcgcaattgcaagggtttcaggcgaacagatgatcttatttcttaaattgtatttcttggtagcagtcttatttaacatgtgatcaatatgtgcatgtgaaatgaaaacataattttcagctaatatttgcctcggatctaggtatatttttttttccctgcttgtaagtattatttgatgttttgcatccgaggtgatttggtacggcactattggattatcttgatgagcttatttatttaatattatatcatatatttgaatacattaaaattaaatttatattgaatcaaaattaagaaattgaatcaatccaaaataatttatgttttgcttgatggggtaggcgaccttccacatccagatttaaattgcttgaccccgctggaagcggcatataccccatatctagataagattgctagaatgggagtttcgggccaagttgtgagtgttggagacggcatcgctcctcagtctgatattgcagtttttaatatgttaggctacaactttagagacattgaatattttggaaggggtgtagtagaatgcataggttgtggaattgattttaaggagggggacctagcactaagaggcaattttgcaacaatcgacccaactactaagaaaattttagacagacgagctggtagaattgttaccgaggcagattcggccgcaatctgtgctctcattagaaagaatatcaagatagagggaatagagttctcgatagagccgacgattgggcatagagttgtcatacgattcaggaaaaaaggtacaacattaggtgagaatattacaaatacggatcctgcttatgacaaagtaaatgggattggtattgcattggatacttccaagggagatttgtatgtaacaaaatcagaatcaaaggatgcaaattctcgattatcagccactaccataaatcagttctctgaccaagtgatagaaatactggataattgtctggtgaatatagagcggaaagaaaagaatttcttgccaataaattgtattttattgagagacgctgggaatagatatcctcatttacagcgtattaatgataaatacaatctaaatttcgcatctcttgttgatatgcctgtggaaatcggaatttcacaaatactgggaatgaggtcgtacaacgctggttctccagatgaatatgaattaaaagctagtaaattactaaagataattgaagatcacgatgttgtttatgtccatattaaaggtcctgatgaatttggtcatgatgggaacgccaagggtaagaaaaacaatataaatgaaatagacaagcgcttttttagaaaaattttagagggaattagcacaatgaaaggtatagaaatatatttcataatttcgggcgatcactcaacaccttgtattaaaaaggcccacaccgacgatcccatacccataattgtttctggccaaggaatcaggaaagattctacttcaagatttacagaatcaaattccaagaggggatcattgggtaaaatctatggatatcaagtattaagtactgccatcaagcaattagaagaccgaaaagtttgatctcacaagttacgtagtaggcttgaatcttaacaatgctccaatttttccaaggctttgaatctgggccccctcttcggttttagaagaaattatgtcaagttttgttccagctagtgaagcatattcctccaggtagtctatgaaatccttttcattaattgtgtagtcctgtccaccacatttggaacagggcgtagaaatgatattttgttttgtttcaatcagttggtctctttcaactattttttcatagccgaaatcgcattttctgcaaattacttctaggtatactaaatcaatactatcggttgcaattatcgaatcggttattcctgccttgagattatttacaacatcattaagcccatatatccctaaccccttacctgaaaaaacttcacccatgaatttcttcaccattttcttttcttccatggatcggaattccgacattattccttgatcatttaccttatctatgatttcccttaccccctcgtcaccagaatacgaagtatcaagtgtagcaatgatattattttgcaatctataatcaagatattcctctctgacaaaagtctcttttgtgggtcctgggcctcctactatcagacccttgaccgtatattggtcaataaaaattttttgcgcataatttgcaatacgatggtaatattcattaagttcattatctctaagacgctcaaaccttcgcgcagattgtcctccttggcggtgtttaccagaaactccagatgtcaaagtttcaattgtttcccatctatccccagttaaaattcctaaccccgcctcttgagtgtctatagatataatggcaattgtacgatcatcttttagcatctcctttatatgatctatccaaaaatgatcatcacatctatacaagttaatctgaactggttttgggggtacaaccgtgaatatttctattttttcagttcctaaacctttccccgtaggaatggccccgcaaaaaataaccaatccgttttcaggaggttccttatacaattttaattgttccattgttttgttaagggcatcctgaacatgatttctggtcaaatctgattttatgtttgatgcagttccggcttcatttctcaattgtgctaaaacatcatatatcggcctttttggcggaatataaacagtaactagttcagtaccgtgaccagttatctttgatagatcatttaacatttttgttaatttgtatttttttactgaatcccatttttcgtcgctacttgactgaggcacaaatgttatttggttttacttaatttaatttttgacaatttagatctgctaggaagctcagaccgaaatgaaaattacaggaaaccacatttttcaacatatgttacaaaaacgtaattttgtcgaatgatcaggaccatttatttaattttttatactaggaattatttcttttacaaaaaaaggatgcataatacttatttaaagcaatttggtgaactttttaggtagaaaaattgtcagaattaagaaaggattattatgttcaagataagtttgttttaatacctaataatattgataatgcgaacaaaaaacctgaaatcaattacaataaaacgcaatctgctcctgttactagcagtcaagtatgtccatattgcactggatctaccggggattgtgacaatcttgtattatcttttgtagtcaaggaaggaatattgcagagactttatgatacaaccgatgatgagaatgagaattggtcgatccgagtttttgaatgcacgaatcccctagtgaccgcgcactcaaatcagcagtattcagatcgtccattctatagggagccagcatgtggatatgaccttattatcgttccaaccccaaatcatgatatcgctctttcagaattgtccatcgatcaatggaccaatctgttgttggtacttcaggacagggtaagatggttatacagccagcggggtgtgacatatgttgctatatatgccagccgtgggactaatgggggtagtaaaataaaacatcctcattttcatatcacgacattttcttcaatccctcctattatcgaaaaagaagcgaaaacctttcaccaatccatgaatgaaagcggtagttgtcctgcctgtagtatgatagagtctgaaattaacggtcccagacaattattctctactaatggtttcataaccttagttccatgggcgcccacctataattacgaattttggatttgtcctcgaaaacattctacctttttttcaaaagcaagtcagaaggaaataaatgatctagccttggtgatttgttcatccttacgagggatggataggatactgggtaaaaccgattttagcatggcttttcatatttcacctgagaaaaagaatagtaggcaattacactggcacatagaagtatatcctctaatctcctcttggtctggtttggaaagagggtttgggatatacgtaaatacaccaaatcccgaagattcagctaaaattttgggagaagcttcaagaaaagaattggcaaatttgattggggtacattaacattctcttgtaacaatattaaaatattgtatctttcaaaatgaaattatagaaatgttaagggccggagagtggttgtcaattgcagttttgggtctggtagttttattcatatttaactcaattgccttcttcacttttttgattggtcctgagagaagtggcccaacaactaccgtcgatccatccactgcttttctccaattcatattcatttcactagcacccgcaatcggactttcattttttacaaacgtgctatccgaagggtcacgattatcctccttactagtattagcatctggaatttgcttaatattcgggatgatctatataactacattgatccctttgataactgaaattgatttaccatcatgggttgtctatgcaccttgggtattttcaatttttggtatactaatggtagctatgggttacataaactatagaaagagtctgtatatgtccgccaaaaatgctaggatctaactacttggaaatggcgatagattagtcatgggaaatgataaacaattgactagtaaaattaatggagcaaatcagaaagatattaacagaaagtttgatacactttcaatagacaaggagtttcttccaattaggatcaacaatcttaatttagaatcgattttttcgaaggataatgaatttaataaagctttggctattgtaataggcactaaaccagatttttataagcaagctcctctcttgatagagtcaattaaagagggtttaccttcatttattatttctacaggacagcattacgatgaattgctaggctatgggattaaggaatttgaccttgaaaattcaatagtttgcgatttgcagatacgtggggacttgatggaaaaatctagcgatttaatcatgaaatttgggtattttggtagatatttgaaaaaaagatactcaagcaaccgaattctaccgattgttcatggtgacactttggtggcaggaattgcaactttgtcttgggtttttggactaggacaaaaagtcggacaaaatgaggctggactcagatcaatgagtccaactattataaaagatataaagatgaatgtaaatcctagccattccgatgtagaaaaattcattacgaaccaattgtcctcatcatggttcctaactagggaggaaccgtttcccgaacaaattgatacttgggtatgttcttcaggaacaaagtttttttttgttcccactaaactaaataaagagcatttacttagggaaggatatccagacgaagatatccatatagttgggaattcagttgtagatgctattggcatcaaaagaatgaagaaacctgagaatagcatttttgaaatatatcctaaattagaatccggaaactggatcagaatggatattcatcgcagggaaaatttaacgaaccatagatttaatgctataataggggggttgagtgatttgataaaggattcggaatttaaagtagttttagtcttgttgaatgctaccatatctgcactatacaggtttgatctttatgataaacttaaatatctggaaaatacttatcctgaaaagtttatgattactgaattatggagggaatatggccacgtagtagagtttctggacagtggaaaatgttgggcagagattactgactcgggatcattgcaagaagagttattatatttcccaaaagttagctcctttaccgtaagattcaataccgatcggccagaaacggtctttgacgctagagggaatcttttagttcctccgataaaccgaatgtggttaccgagaatgataactacaatatatgaaaaaggagtggattatggatttaattttaaaaagaaaaaacaaatttatggaaaacctggagaagtatccaaaaaaatagttagaataatgaagaaggaatttgagaatagagaaagtaacttttttccttggttacatcaaaggtttaactattggcacgagaaggatgattttgactatctttaatttggtcaaaagcaaatagttatataattatgaattagaaaatttttattggcctccgatacgaagttcaggattaacctaaaagaaggtgtttttgaacttgaaggaaatgaatcattcgtagataaacatttagaaaagtttgaagaaattttcaaggttgctattaaggaggtcatcattaataacaaggacaatatgcttaattacacaactacgccatctaacgcaactgtagacaatgttccaatcccacttgagaatttttcttctcaagaatctagaactcattcatcgaagcctaaggacttaaattcagagattgatgatattaaaagagaactaccactctcaggcaagactacaaagcattcgataccaaagatctctattaatatacctccccttcctgtagacttgaaacaaaatcatgaaaaaattggcctcagagatttttatgcagagaaaaaacctacgaatcactacgaaaaaactactttgttcgtcttttatttaaccaactataataaacaacaggagattaaatacggagagatactctcatgttatgaagaaatcaacgaaaaaaaaccaagtatcatcgatattgtgaaaaattctataaggtacaaaggatggcttgagcctggtattgataaattgtcaactcgattaacaatttccggtgagaactttataaaatttgatttaccaaaaacatgataagattctgaattaatatccgtatgaccatactttaatcagaatatattaagctctccaccagtcaaagcctatgaatttgatggaatcgtccgataaatcaacaattgctaaaatgaattgctttttaacagtggttgcgagccttcctgcaagtactatatctatgcttgtaatattgtcattttgtttcaatacctttacgagaaatggtgcatgatcgatgccaggtccatgaatataaacagcaaagtcgcaaccaaattttatacctgggcttacaatatagcctttatctctcaaattttcaaataccacatacttgacctcaaagttaacatattgtttcttacaaatttttaggatttcttttggttcaacatttgtggcagaatctttgaaaattttgagccgatttttattacaaagatagtacccctcaatgagatcgagtactatcggtgcatcaaattccgaatttttaggtttagatattcccaatggcttaccaaaatatccatcaccaaacaaagctcgtgattctaaaatatcatgaatgaatattctattttcgactagttgaccagtaaaaggaattatcaaatgcttaatgctagtattgtaaaagagttaaaagcttgttgagatttgtcgaccatccatttcaaccccagttcaaaatttagtttaatgatttttggctctatattagacaatctaaaggagatcccactgataaaaccagaaaattcatcaataaaataagcagttcttaaaaggttttctctataggtcattaaactgccaacagctattacctctctaatgatttgttttgtcagcaccattatctcgttttcaacgataatcatcttattagatgattctctaatttcatcctcgttatcttggataatagcatcaatcatcatcgctaattctcgagaaaaattcagaatcttatttgtctcttcttgtagtattgcatttgttttcctctttgcttggacctctagctcaccgctatacatttattagttacaaaagctcgcctgttcatataattctttattataaactgtctgaagactgacaagacaggtcaaaactttaattaagctgataattggtgaagttttctttgatttctatgagatcccttaaaatagaactagcagtttccatgcctccagctccttttcctattatcgtttgcgctccagaatgttccgatctaaaagtaacagcgttcaaagtcccgttaacacatattggatcatcttttgatattggaatgggtctaacgaaaagactatccttgtcacaattggcaattaattttaatgatttcctttccctagctgccttaattatttcttcttgagctactttagtaatccctgttttgtccacatcctttaaagttactttgtatcccataatccagttagccattatgactaatttagctgccgcgtcatctccatcaatatccaaagaagggttagcttcagcatatcctttctccttagcatcttctagtgcttcactaaaatgcaatccttcacccattttagttaagatataatttgttgtcccatttaatattcctgtaaaggatgtaattctgtccccttttagacaatgttttgcaaaatccagtacgggtgtgcccccccctactgttccactaaatcttaacataacgttattatattcagatagttcaactaacgaggaaaaggataaagctaatggtcccttatttacagtaataacattctttttagttcttaatcctgagattacatgagacaaccctggttcggctgtggttaagttggtaggggtaagttctagtaagacttctgcgtcaatattttcaatataattatcagcattaaatattgattcagaatacttgctgacttcgccatattttgccttaaccattagaactctctccaaatctaagccagtttgagaatatgcaactcccttgctgtctatgcatgccacaacccttggtttaatcccataattcttatataataagttcgaactagaaatcagtaaccttagaaaactttggcctacaacccccattccacatactattattctcattaaaattatccttttatcattataattaggtgaatataataaaatttgtattagaaaattatcacattaactgtgctaaaatcgggatagtaataaaacaaggtcctaatacattaataaatgaaattccaggtctattaattatgacactgtctatggatcgatttgaaaatgaaaaagataaagctaaaaaaaatcatactccaggtaactccgaagagaatcacttcgatgttataataatcggctctggaccagccggatacacggcatctatttatacatccagagcaaaattaaggaccattgtaatctcgggcagtttacctggtgggcaattgatgaccactacagaagttgaaaattatccaggatttccaaatgggataaatggaccagatttgatgacaaatatgcaacaacaatcagaaaggtttggaactactatgctcatcgacgaagtcacaggagtggattttaattctagaccatttaagatttttaccagctcatccgcctacacgtctgatacagttttaattagtactggtgccactcctagaaaattgggaattaaaagcgaacaagagttttctggaaagggcctatcttattgtgcgacttgtgatgggccattttttaagaatcaagacattgtagttgtgggcggcggggatactgctctggaagaagcaacgtttttgaccaaatttggtaaaacagttaaggttgttcatagacgtgacaatttacgtgcaagtaaaattttgcaagaacgtgcctttgaaaatccaaaaattgaatttatttggaattcatctattagtggtatcacaggagacaagaaagtctcctccgtagtcgttaagaacatgaataccgctgaagaaaaaaatttagaagcgggtggtgtttttgttgcaataggtcatgaaccaaatacactatatttaagggacaagtggacctggatgaaaaaggatatgtaatagttcagaatggtacaaggacaaacgtcgatggtgtttttgcagctggcgatgttcatgattttaagtacagacaagcgataactgctgctggatttggctgtatggctgctctagacattgaaaaatggttgtctgaaaaaaataataaataaaaaatcctcatatttcatttttataccatcgtagccaataattgttaaattttatccgcttgttactactggtatgctagttttggcaaaaatccattgttattcaagtaattttcaaattcctcgtctgtaaataccgattgttctttgtacaaacttttgaacttgcgaccgtcatcggcgaatatacccacaaaaacttggtccttgcctgtggtctctagagcccgctccatcatgctggctaaaacagagccagaagatggtccaactaacatattttcattcagcgcaatctgctttaccattctaaatgatttttcgttcgttgctgtataccaatcatctaccacttcttcacgccttaagaaaagctctggcttcgctgattcttcaaagtttcttaacccttgaagcagatgatttctctgtgcttgaacagcaactacttggatttgattgttcttttctttcaagaattttccagttccagttattgtacctcctgttccagcgccggtgaaaaaatgagttatttttccattggtttgttcccatatttcgggtccggtactttgaaaatgagaaagataattagaatcattttcgtactgatttggcatatagtaaacatctggtcttggtttggaaatagcgtaagcaagggctatgctctgatccgtaccagcacctactcgggggcacaaatcatctgaggtctcatgtaatacagctcctaattttctaagaatatccttagtttctttacttactttttcaggaattacaatctcgaccttataacccaaataagatgcgatacctgctaaagcaatgccggtgtttcctgatgtaggttcaataattatacttttatcttttctaagaatttttttttcttcagcattttttatcatccaataggctgctctatcttttactgacccaaagggattataccattcaagttttgcgtagatttttacattattcgttgaaaagcttttcaattgtattagtggtgtatttccgattctatcagttacattattagattctgaataggtagtcgaagctgtcatcctactttgcctttttaattgtaaattctaaatctttatttgatttgtttaaagataacaattcatgaccgttcctgttaacccatctagaaatgtcatcctctgaatctggatcgtcagaaactacttttaataaatcacctttggtcatacgttcaatttcaattttagttctaaaaactggttcagggcaataaaggccccttacgtcaatagttttcatactagactttatgttatcgtcaggattggaagacatagttaaataaaggcatttgaacttaattaaatgtttttgcgaaatatacgagggattatttattgatttcagcctctaatagacctaaaaatctcttaattatattaaacgagaaagtgaatttttgatgactgtttaagtcaatattcaattcccgttaattgactaacctcctaagtaaaatagcaaacatgaagtcataacaacaatgatcgaaataaatagactattctcttcaatatcttaatattatgtatggacaaggagaatgatttgtgttatgcttgctatatttgacgtagagggcgtattgttaaacgctgaatatctaccagttttggcaaatttaattggtccagaaaaagaaaaggaaatttgggatataaccaacaaaggtatccgcggggaaattaattgggaggagggattaatagaaagggtccatgcattaagaggcataggttatgatcaagcatccaagatagcgcagaatttggagataatgccaggagcaagagaattatgttctttcctaaagggactgggttggaagttagtggccgtttcgggagggtttaacatcataactgatagactatactctgaactaaatatcgataaaatattttctaacgaccttatctttaaagacgacaaacttttggacgttaccataagagttacctcagataaatctgcagcagtaagatcatatgttgaagagaatggcttttcgagggacgagatagtagtcgtcgtcgatggcgctaatgatttgaagttgtttgatttatcttcttttacggtaggattttgtgcagtgaaagtagttcgtgaaaaatcagatgtagttattgacaaaaaggatttgtctctgttaatccctataataaaagagaaattcaaaattaagattaattcgtaacaagaaaagaatatgtgattcttttttgatttctatcattccaatacgtataaataaaaatattgaaccccacgatgacgtgtcaaaggtaattcttgaatcattacaattggacaatgtgcagatctgcgatcatgacattatcgtggtggctcaaaaaatcgtatcaaaatcagagaatagattgcgagatttaaggaacattattccttctccaaaatcaatccggttagctaattttcactctaaagatccgcgattgattgaattaattttaagtgaaactactaggataatacgcatcacaaaaaaacatttaatagttgagaccaagcatggatttatttgcgccaatgccggaatagatcaaagtaatgtttctgaagattctcaaaaagcccttttactacccgagaatcctgatatttctgcaagaaacttgaggaaatcattttataatatttctggaaaaaaagtatctgtaattatagccgatacttttggtagacctttcagaacgggtcaaactaatgttgcgatcgggattgctggcattatccctttaaaaagttacatcggaatgagggatgaatatggaaaaaaattattggtaacagaaattgccatagcggacgaacttgcggcagccgctgaacttgtaatgggtaagactttaaagattcctgtggcaattatacgtggttacaaatatgaatcactttcattagaggaagaccacggatttagcataaaggcactgttgcgcagtgaacatgacgatttatttagaaacccagataatatgatacattattctgattgaatcaatcaaagattgcaaaataatttatttccaatacttttatctcatcccaatggatgatattgttgaaggcatattaaataaaaataaaagaattattgcacaatccatttcaaagatagatgacgaggacccattagcccatgaaatattaagaaaaatttatccaaataccggaaaagctgtcacaatcggatttacaggtcctgctggtgcaggaaagagtactcttatcggaaaactgatttcttatttcaagaattttggtttcaaaatttctatattggccgtagaccctacaagttctatttcggggggtgctattcttggtgatagagtccgaatgcctacaaccatggacgatgacgatattttcatgaggagtttgggttcaaggggagcatctggtggcatctctaaatcactgcgaaatataatccgaattttagatgcagccgggtatgacctaataatagtagaaagtgttggtgctggccagttagaaatcgaaatttcaaaggttgtaaatttaacggttgtaattttcaatcccaacaccggcgataatgtccaagcggttaaagcaggattaactgagattggagacgtatacatcgtgaataaatctgacatagagggctctaatactctgtatctaacactcctagatctcataggcgagttacctagaaaaccattaatttttaaagtatcggctcattctggggaaggactagatgtattatcaaaaaaaataagagatctaattattactgatgattggatttcaaaaaagaagaagaaggaaagggaagatttaaaaacagagctcaaattgatggttttagacgaagtgagagaaaagtctttgcaagtgttgaactcaaaaaacatggagataaacaagctggtcgactctatgttagacaaatcaaaggatccatataccgcagcagaagaattatctttattagtattttccagtaaatgatctggtatgagcgaagacaagaattcgatcaagactgattctaatattccggtaaaaaagtattatacgccggccgatatcaagaaagaaaatgaatctgaccccggtatttatccgtatctgagaggaatttaccctaccatgtatagggaacgtcattggacaatgagacaatacagtggatttggtagtgcagaagagacaaataacagattcaagtttcttttaggccatggtcagacaggtttgtctctggcctttgatttacctactcaaacagggcgagattcagataatcctcaatcggagggcgaggtaggtagaacaggagtagcgataagctcaatagatgacatgttaacttgttttaaagatattccgcttgataaagtaagcacctctatgaccattaattccactgccgcaacgctgctttctttgtacattacagttgcagaatcacaaggtgtatcgccctcccaaattagaggaaccactcagaacgatatcttgaaagaatatcattcgagaaatacatacatctaccccccccgaccatcattaagacttattggagacatgatacaatattgttcaactgaagtatctcaattttacccaattagtatctctggatatcatatccgtgaagcaggttccaatgcaatccaagaactagccttcacttttgcagatgctatcgagtacattaatacctgcgtggaaagaggactggatatagataattttgcacctagactttcttttttcttttgttgtactatggagtttttagaggaagttgctaaattcagagcagcaagagtaatctattctaggatcatcaaagaaaggtatcatgcaaaagatccaaaatcttcacatttaagatttcatgttcaaactagtggggaaagtctaactgcacaacaagttgataataatatcatcagagttacaactgaagcactggctgcagttttaggcggttgccagtccttgcatactaattccagagatgaggcgttggctttacctactgaagagtctgttaaaattgctcttcgaactcaacaggtgctggcctacgaaacgggagttacgaaaacagttgacccattagcaggctcctattatgtcgagtatttaaccgaacaaattatcgatggggtcaattcttaccttgacataattgacaagatgggcggagcattggcagcaattgagcgaaactttttccaggaagaaattagaaaaaatgcatattccctaaaaaaagaaatcgacagtagtgaaagaacaatagtaggtgtaaataagtttacagacaaaagtgacatcgagccaaaattggctaccgttgaccctcaattggaaataaaacaagtaaataggctaaaagaatttaaaaagtctcgcgataatgttgaggtccaaaaccagatctcttccttgttgtctgcagccgaaaagcaagatgttaatttgatgccatatttaatatcctgtgttaaaaacaaggtgacccttggcgaaattaacgatacatttaaagagattttcgggacttatgtaccaaaaatctccttttgagtattcatcttctattcgtctttactctcatatagtttcaaagaatcttgattgttactcataatggtgttgaatacttttctaccgacttcggactttttatctatctttaatttggctttctttccaatttgattgcttattagtagctcatctcctaaaaataaattaaccttttttcctatttgtatttcttcaactagtaggtaaatccttgatcctgattcggttatgctaaatgctacttcattaccaattagtggaactttcgcttctacatcaatcttgactcctaagattttttctatttctgatatggttgaacctcctctaccgattattctgggaatcacttctttactaactattattcttatcttatcattggaaataatcttgatttcagctttgggatcaaatttgcctattacttctcttatcttggattctgctaacttatttatcttgttatttctttcattatcagtttttttttcaatatttttcaaagggataattatgttttcttctccataagagtaaatctcatattctgattcctttgaaaaaaaatctttgatctcaaccacaggcctagcaagatcttgttcaaccattcctgcagggactttaacagtcaaatttaattcataaattttttgaatcttacctccgtgaataaatattactgtgtctattacatgaggaatcatacctaattctattttgccaataaagcgttgaatcgcatccaatgcttcattagcatgtattacccctatcatcccaatacctgtaagtctcaggtctgcaaataattcaaaatcctttatccgccttaattcatcaaagatggtgaagtctggtcttacaagtaatagaatgtctgcaaccctttcatacccgtttttaatagaaccatattgtactacattctccggcacctgcaaatctcttggtgattcaagagtcttgacaagtttattattttggacataatattctgcgatactacttgcaaatgtactcttgcctgaaccaggtctcccagctatcaaaattccctctgcctcttttgaaagtctatttatcaaactcatatctaaatggtattcttgtaaggataatttcttaatcggtctaactgcagtaatttctattttatttgatacaggtggttgagtgatgacaattctcaaattcttgtacattatcacgtaacatccgtcaaacgaaatttctatatttgatatttttttattgttctcagtagaaaataggaaattcatgatttcatttaaagtttttttatccaatttagtgtcagataatttctctaaggtaaattctcctggagtacctttctttgctaagggttccactccttctattaaatgcacgctcattgaattttcgtcaaagtaattttctatattaaaagatgccgagactggagagcgtatatgaatgcttgatattccagttgcgttagcagccaaatgttgtatgtaatcagctgtaaataatgtcgcatcctctttttcagctatttcggtaataattgcatctatcctcccattcttggctagttttatgtcttctaaattgggcttttccccataaattcggagtaagatattattttcactagatttttctctaatctttctaagttcagcaagtcccatgaacccgtgttctctctgcttacatgcctgcgactgcagctcatcaattgcagctcgaggaattataatttcaaaattatcatcaatatctttgttatcaatttcatgacttatatggccatctattatgatacttgtatctaaaacaatttttttcttcaaatttactatgatcagatcaatcaccagattcttaaaaaaggttactaggtggaagatatcgtaaataactttgattttctaaaattgtttataactaagtattgacattctcggatcaaatacttttaatcacagttattagaattaatttaatgattcctgaagtctaaaatattctgtaaaattataattacttcaataagagatatgatgataaaatctccccgaaattaatcattcaggataattcgttaattattcatacatttttttctcttatgtttcaatgaggtttgttcctaacccaaatttcacgaaatctcccttctgatttcaaggtaaacagaccggattttttaaagtttgtagggttagtgagtcaaatgtctgttaatatttaaccctcaattatgacattatcagctataaaatatgtaaccagttcatcattgttttcatatactatgattaatttccatgaagaaaatccatcatcaatatttggcactgttaagaaatcagtattcatatatacgaaatgatccaggattatcttcgcaaaactattcgaatctacattagttattttgccggtacccaggttctgatcaacccgataaacttccaaattgtcaaaatcctcaccacatttctggaaagtacaaatatttctcctggttgaagaatcaaattatttaggtagttgtagataattgtagtactcgtcaatactatcgatttcttcattctctgtgacttaataatcaaaattgatgataatttctttattattatttgataaggattctatgcatggagtttgttcattaattccaagtgagtttgaactagtaccatcaatggtagtacaagggcttcatgagggattacttgtaatgttacctcaggttgaattagaagtcaatttatcaaggattataggatcgacttgtatttctatttgattttggtttaatggaagtatggaaataatgtttttatcataggtcataagtggattgttcacagaaaaatttgaattatcttgaggcatatttatcattgattcgtcatcatatgcacagtatactgtttgatttggatagattttgactagcgaacgaatgagagttagatacgacgtttgtgaatgttattagaatcaatcgggcataaatcccggcaccaaatagtaatgacttgcacatttttacgcttaatatatacattcttcatccctgttttacatttagttattgccaattattgcaaatagcgttaaatgacattaaaatgagtggataagaaagaactctgattcgattaatattaaaccaatatggtggtttatctaacaattatgccaaggtgatcattttagaggtatccgtttatctaaataagattaacaggttaaatacacctggcttatttttgcattttgtagaatccgattcacctttattcatctgagcgacagatcaaaacgttatatttactaaaatattcaaatttctaataaaataaatgtgttggtatatctactctattaacagaatttctgattttggattttcaatatagccacttagacgacagcttcatttattttagtacataaaggatagtagtaagttgttatgtattttgtacaagtttctaccatacccgtctcaaaatattaattagacgaaatctaagctttaaattatataattgattatccatattacaatagtttaattgagtaaattggaattgaaaaatataactaaatccttttcagttaattcatcatcaggtgaaaggagaagggttatagctgtagataacataaatttatcaattgaagagggacaatttgtgtgctttgtaggtccctcagggtgcggtaaatctaccctacttaacattattgcaggtttagacaagccatctgaaggagaattggttcttaacggacaatcggtgcttggaaccggtcccgatcgcattatggtctttcaagaaaatgctttgttcccctggttaagcgttatcgacaatgttgaatttggattaaaaatggttggagttgaaaaagaaaaacgtaacaaaattgcattacattaccttgaaatgatggatttgagcaaattctccaaatcctatacttatcagctctcgggggggatgaaacagagggttgcgattgcacgtgctttagtaatggatcctgacatactgctcatggatgaaccttttgctgcacttgactcgcagactcgtgatcttctattagttgaacttcaattgatatgggctaagaccagaaagacaataatatttgtaactcataatatatctgaatcaatatgcctcggtgacagggttgtggtcttcacaaagagaccggctcgcgttaagaaggtaattcagattgattatcggagaccaaggttatctgaagattctaatttatttgaatataatagactagtcctcgatgaattaaaaagtgaaataacccaacacaaaagaacaatctgatatacttttgccatactaaactgagttcttcaaaactttgatcccttcatcaaaactattgggcgaggtaatcagaatatgatcagtttctttataaacttcttttaagaatcctgggaaattatcttgatattcactccaatccaaacctatcatagtagctgccccttcattctttaccgaaggtaccatgatgcaagggataagctcgatatggtagggtttcatcagatcttttaaatctctgatctcttgaattgaattaatcgattgtgttataaacctatggggttttgcatttaccttcttctggagtagtttatgatttgaaatcttgtttggtatagacaaattaagatctataaatttgtcaaatcctatggaagttaaaagcttgactacctctgttggatttgaaagtgagggtgttcgttctgaattttgaaacgcaggtttgtcaccttgaataaataaaagtccgctaattttcaaaattatagcgtctgttgtcatttgtataagagaattcatgttcctatctcttgtcctcacactacaactcatattcaagcttacattggttagattattcattatcatctgtgctgcatgaatacttgaaaatctggggataccaagtacggaatcggtaatatggatgtagtttgtgaaatttgaaataatttttgctctgttaaggaatttacttaattcttgatttaaaagtgtaatatctattctctgactatttaaaatttttggagggtttaactcataaattagattcattttttagtttagttaaatgagtatgactacagtaaaaaaaggttttttagataatattattatcatatctcctagttttgatttctgaaaaagaattcatcgaacttgtcacggagaaaagcgactccttagaaaattttaaaaatattgatttgagagtaggaggtgaattcaacaaggaacaatctagcgtgcttgttataattcattttaatcatgaatttactccaaccatcattttcacgaaacgaagttcaaatctaaggaaccacgcaggggaaatttccttcccaggaggtagagtttctggccaagatcgttctattatggagacggcaataagagagacctatgaagaaataggcctcgcgattcaaaaagaaaaaatcattggatctctcgctcccacaaatacctatacaactaaaatacttatctacccctttattgtgatactcggcaaaatatcatttccctttgagcctaatgaagaagtagaacaagtgattgaaataccccttgaaattttgcgcgatcgcatatctatcgatgaggaccactcaagcagcgataataagatgtttaaatttaatgtggatggctatttaatctggggggctaccgctagaatattaaaaaatttgttagacttgatatatcctatataggaaatttttattgggtcttggtatcagtcatatccaatgtccgttaatagactaatgaacttattactgaattcttttgttgacaacttgccgcctatatctattgttttgatattcctgatgaacagatcatcaactgctttctctattttgattgactgaactattaaattactatcttggtacttctcacctaaccagtccaacatcattttgagtgctagaataaatgatgtagggttagccacattcttgcctgcgatatcaaaagcagcaccgtgcacgggttcaaacattccaaagtcttttccaatatttgcagcaggagccaatccaatgcttcctgtaatttgcgcagcttcatctgatataatatcgccaaataaattggtggttaaaatagtgtcaaatcgatttggattccttattaattccatggcacacgcatcaacgtacatctgttcaaattcaatattgggatatcctttggccacctcttttgaagtatctataaaaagtctatcactcagtcttagcacatttgatttgtgaacaatcgttaccttcttctcttcccttgaatttgctattttgaacgcatgctccgcaataagcctggatgcttctctactaatcttccttagggaaatgaccgtgtcatcgtccgaataaaattcccaacccaggtataaatcctccgtgttctccctgacggtaattaggtcaacattacttgagatagatgggatatttgggtagtttttggatggtcttacattagcatataattcaaaatatctcctcaataccaggacaacgtccgcggccgattctccaactggagattttagacaagcttgagagtttttaatcttttcaaaggtttcatctggaaggggtttgttatattttaatttggcattatcgccagcttctactcttgaaatattgaactttagggttgatgatttgtcatgtatattcattaaaatgctgtatacacattctgacaattcaggaccaataccgtcaccttcaagaagggatatatcatacgtagtcattcataagtctctcatgatcaaggatgtagttacttggtaggctctccactttgaatcatcttttttaacattgttttatttatggcatcaatcatcgcttgaacagaagccacgacaatatcttctccagatttcctagcagaaataatattaccttctttatcttctacttttacggatacttcagccaatgcatccgagcctcctgtaattgaatcaagcttatattctcttattttgatatttgcaataccatgagcaatagtttgtatagcctttaatgctgaatctactggtcccacaccagtctctgaggcgataaaatctttgccatgaatattaagtttaaccactgcggttggaatgatgtgtagtccagtgactatatgaaaatcattaagtttaaaattttcatcgaatttcttgttctttagtacttcagatgctatagataacaaatcagaagtagttatagattttccgccatctgctatcgatttctgtttttctacaatttctttgagctgcaaatccgaagccgtaattccaaactcatcgaggattgctttgataccatgtgcaccagcatgtttaccggcttgcatccacctttttctaccaactaattcggggctaatgggttcgtatgtcaatggattattgataattccatgtgtatgtatgcctgattcatgtccaaatgcattctcccctattatagccttattcggttgtacaatgattcccattgcactagaaacaaactttgaaacatcatacaattgttcggttttgatattatgaggtatttgatagagacactgacatgccatgactaattcttctaatgccgcattccctgctctttcgcctagcccgtttatggtaacatgagcacaggccgcacctgcttgaaatccggctattgaatttgcaacagccaatccaaaatcattatgacaatgtacactaacaggtaatccggttacctctgcaactcctgataccaattttgatatgtactgtggggttgaatagcctacggtgtcaggaatgtcgatcctatcggcgccagcttctgcaactgatttaaatatcttatttaaaaattgaatctcagatctagtagcatcttcggcggaaaattctacaactaatccatgtttttttgcatattctactgcgtaaatagccttttccaacacttgttcccttgtcatctttagtttatactgtaaatgtatatcagatgttgcaatgaatgtgtgaatatattttaaatcgcttttgagtgcgacatcaatatcattttgagtggtacgcgccaagccacagacctctgcgttcaatccttgcttaattattttttttatggcttccacttctcctagtgagactactggaaatcccgcttcaattgtgtctacacccaactcatccaacttcattgctatttctaatttttgatccggagaaactgttactcctggggtctgctcaccgtcccttaaggttgtatcaaaaattctgattttccttttgttctcagaggtggtcatttacagcccccctaggcaaagcagagacaccggttctagctacttggattataccataacttgaaacaagatttttaaatgcatcaatcttgtctggagtcccgattatctccacagtaatagtttcgttactaatgtccattatgttacccctataaatggaagcaaaatttgcaatttctatcctggtggtgggatctttggcgttcatcttgatcagcgccaattctctgtatacggcgttctccttgtttagtacatttatttggattacatcaatcaatttttgtaattgctttactaattgctctagtgttttaacatccgataccgtggtaatagtcatccttgataagtcaggtttttcagttattcctacagtaatactttcgatattgaaattcctggacctaaatagattggtaattctaaaaaggactcccggtttattttcgacaatgactgacagaatatacatcttgttttcattatcatcatcaaaaattgtgttcttatttttttgcataccttatcatgctccaataatcatatctttaagcccagttcctggagcaacaaacgggtatacatcctcatccggatctattggaatatcgatcacagttgctatgtccgatttgacggcaactttgagtgccttatctaattcatccattgaacccaccttatatgcttgcgcaccatatgattctgccaatttgcaatagtcaggacaattctttagatgcactccactatatctcctgttatagaaagttctctgccactgtgcaaccatgcctaacatttgattattaagtaagaatacaatgactggcaattcttctaagactgaaactgcaagtgaattttcagtcatactaaacgatccatcccctgcaatatccactacgggtacatcgtttctcgctgccttcgccccgatagaggcgggaaatccaaatcccattgtccccaatcctgtcgagctaaaaaatgtcccaggagagatgacgtcaaagtgcaatgaagcccacatttggcattgtccaacctcagtggtcacgattccatctgcaggcaagatattgcgtaacttctttaatgctttcttggctgtaatatctcgaggataatctttgatactatcctcataataattaactaattcccttttcctccccaaccataatttggaaatttcttcgttagttctgaaattctttgggattagctttatgagactccttaatgatgatttaacatctccaatcaccgcagcattcactgatttgttcttaccaatttcagccggatctacatcaaaatgaataacgttgatatctttgccaaactcatcaaatctccccacagtcctgtcagaaaatctagcccctatcgcaagtatgcaatctgcttcttgtaccatcttattagcttcggcatgtccatgcatacctataggaccaagtgccaaagggtgattctcgggaaatgctcccttccccttgaaagtagttacaacgggtattgaaagtaactctgctaatgtctgcaattcagagaacgctccagaaagaattactcctccgccagccattatcattggcttttcagccttaagtatcatttcacaggccttgttgatctctgataaatctgcatcaactatgggattataccctctaactttgatatattcaggaaagtccatcttcgttacctgttgctgtacatcttttggtatgtctattaatactggacctggtctaccactctctgctatataaaatgattttttaaccatttcaggtatctcatttgcaactcttggctgaaatgcgtatttagttactgggttagtaacgcctataatgtctgtctcctggaacgcatctttgccgatcataggtaaagcgacttgaccagtcactgctataaccggcgatgaatccgcatatgccgtagctataccagtaacaagattagtggcaccgggaccagaagttgcgaaacacacacccgctttcctcttaatccgagcataaccatcagccatatgtgcagcagattgctcatgtcggaccaaaatgtgtcttattttagaatctaccaaagcatcgtatattggcagatttgctccaccaggaaggccaaatatataatctaccttttctttttctaacgcagccattaaggctgcggcaccagacatttcactcacgattgatacaactcctattaatcaaatctaaaattataatagtaaaaaacctttaacatgcaatatttttctatttgctatatcacaattcgttgttttaattaatcccattcattatttataaacaaagttaatttataaattttgttaggtatcaaaggacctatacttgattaatacccgtggatttaatagactaaatcgacccagttttattccttgatttttttctaatttcttctgtcatggggggtatgttgctataatgatcatatgcttcttttactgtagaattttcatgcactatagcctctaactgcttttatcattgcaaccggattatccgattgccaaatgtttctacccatatcaaccccagaagctccatctctgagtgcatcaaaggtcaattggagtgcctccctttctgccaactttttgcctccagcaataattactgggacaggacacccctcaaccactttattaaaatcgggacaatggtaagtttttacaatatgagcaccaagttcggctgcgatacgacatgccaaagctaaataacgggaatctcttgccatttctttacctactgcagtgactgccaaaaccggtataccatatttttcaccctcattaaccaattttgaaagattttttaaagtttgaaattcatatttactccctacaaatatagataatgcaagacatgatgcatttagtttaatagcttcttctatagaggtaactatagtttcttttgacggatcctctccaattatactggaaccacctgataccctcaatacaattggagtgttactttcaggaattacagatgttctcaaaacaccgcgagtaagcattaaagaatctgcataatttaataatggaccaacggtttctctaggattttctagtctctcggtgggacccaaaaaatagccatgatccactgccaacatcacacaacgactgttgtcgggctttattattttagaaagcctgtttttcattccccaatccattttgaatactggttgtagtttattgaaatgctataaaaatattgataaagattattccatggtaattatgatcttcatcgagtctataacttggtgagcatgcactaatgctttgtgagaatcctgtaatggaaatctgtgagtaatcaatggttcaaaattcataatcttggcttccattagagcgatggtctgatgaatttccctttcagatgcagcatagcttggtaatatttttaattccttggaataaatcatatttaggtctatattaacttcagtgtctttcggcggtacaccaaaaagagaaattgttccccctttacgtgttatgcttatggattgaatgaatgcgctaacattgcttgtggaaataattgaaacatctgacccattgttaccaagaaattttaatgatttctttttgaattcagcttcatgcatattagcgatattcatgacttcaacctgttggtcaattttcttagcaaattctagccgaaaactattaacatccacaagtaatatcttcgaagcaccaaaaaaccttgccaaaatcatatgcatcaaaccagttggtccggctccaaatattacaattgtatcggctttctgtaagtttactttatttaaagatcgcaaacagcatgcaattggttcaatcaacgcagcctcagaaaaattaatgttgtcaggaagtctaactagtccacctctagagagattccaatgtggtacaagaataaactcggagagcccacatggatcaatattacttttttgatatttttcacacattgtgaaatcatcgttgtagcaaaaatggcatgaataacaggggacatgatggtgtacaaaaaccctgtcaccttttttaaaatctttaatattcgctcctaatttaacaatttcacctgcaggttcgtgtccaattcttgaagatttcatcccatattttccaaaaaccttttccaagtcagatccacagattccacaagccttcatacgcaccagaacttcattattaccaaccttaggtaaatcaaaatctttcacttctaccttgtttttaactagcactgccgccttcatacaatattcatgactgggaatgttcaataaaattttattattttgaatatttttttggcttcttttgaaatatttttttacacccttcacagcaaaaatatatttttttatcgttataatcaaggattgttgctaaatcttcgcttagttcaattccgcatacagggtctacgtgcacagttaaaaaaaaaatacctaggtatttattatttcctaaccgatcatctctatatccatatttctcatttattttatcattaagtcaacgttagttaaccacatctaaatttataagctcaaaatttaatgaagttgatgtcttgtccgattattgagatattttgctatcagtgtggaagcaaaataaagcatatgataaacgtaaaacccatcaaggatattttaagaaatacaatgaatagatgctcaacttgtggaatagaacttaacccaacagatttcacaatcgaattagaaaaacaataaattaatctgtctgttacttagaattaattattgataaaatatagataattttaaattcgtagctagatttacctaggatgtgtcatttcaaaggaaattttactcgggttttgcaacacccaagggcacatcaaagtatatggataacgctttaaaaaggggtgtaagtaaacctcatttcaaaaacatagaaaatatgaaactttcttccgtgggaatgggtatttatctcggaaacctctctgcacaagacgatgctgaccttgaaaagtctctttattatagcataaaagaaggtgggataaacttgattgatacgtcgataaattatcgttcaatgctatctgagaaatgtataggccgagctataaacaacttgattgaagaagaagtaattgatagggaaagtgtgtttatttgtacaaaaaatggatatgtaactaatgatggggatttgagtaaagtagatatcgatacatatttacaaataatgtttctaaataataatatcatatctcgttccgacctaagtccttcgtaccatatcatgaatccgaattatatttctaagtgcctagacaagtcgttatgtaatatgggaattaatacgattgatttgatttacattcataattcattcgaaagttggtataacattgtagataggtccacctaccatgaaatgttgtctcgggttttccagttatatgaggatttcaggcaaaaaggcaaaattaatttttatgggatggctacttggaattgctttacctcaaaagaaaacagtaagggttacctatctttaaaagaggttgtcaatatagccaaagatgttggtgggactaacaacggtttcaaatttattcaattaccctttaatatgtatcttaacgaaccctacacatttagaaatcaacctacagaaacatccaacaaagcaaccctactagaatctgcccaaaaatatggaatccatgtttttactagtgtaccactttaccagggaaaattacttcattcagaactaaacaaatcgccgttagacaatcttcctgcgatgtctcttaaattattacaatttgtccgatcgacaccgggaattaccgctcctttaattggacaaaaaaaaccggagcatacaaaagagaacaccttgatttctaaatacccccctttaaatgaagtcgaatttaatacagtgatgagcatgttgaaaaaatctgataaataaattgaccaaccttcaaatcgcatcacaggatgatttttaaattagatatctggttaagggcgataaggttcagatttcttgctgcctcagccatcgccgttacttgtgggctagtattgacaatctggtatcaaccccagaatcttagcctattttatgcgattctaacatatattggcattttctgccttcattcgagcgttgatttgctaaatgactattgggattttaagagaggtatagacttgagaacaaaaaaaacaaaatttagcggcgggacgggagttttgccacagggtctcctaaaaccacgccaggtatatctcgcaggcatatccttcctaattttaggattgatgataggtggtatttttgtttattttaaaggatttgttattgccatcatattattattcgctgctttgtcgatagttctctattcgagtaaattagtaaattgggggttgggggaattatttgtaggggcaaagggagcattaatagtggttggaaccttttatgttcaaaactcaagtattactttagaatcaattgtactcgggatcataattggtatgttatcatcattggttctattcataaattcaattcctgacattgttcctgacaggcaaatgggacggaagactctagccataatgatagataaaaggagcaatcgtttcattttcatatttgtccttggaataaatgtaggaatatacctcttgaccctcgggttgttttcaactttgataaacagttatttttcaattataccttgtattttgcttattccatacataggattaatgctgtacagattcaaaaattttctttacaattttaaacgtcttgatagtgactattacataagaataatggcgaataccgtattcttttcccggttttttgggatttcgctaattgtaggcattacctttgcgtttttatatcagacataagacagaccagagtaaattgataaagatttcgtgttctgacagaaataaattcaagttcatatccaatctcatcaattcgctggacgaatctacaatttttaaacagttcttttattttgacagtgtcaaatcaactcaagatttcgctgatgaattgcaaagagatggtggtgatttttatccatcagtaataattagcgactttcagattggtggtaaagggagaaagggtccgaattgggcatctcccaagggtggaatttggatgtcattggtactagcgaccgatctaaagactcatgagttatttcatatactaatgttggttactaggtcgctttgtcagactttggaaaataataccaaattaatatcgatgctaaaatggcccaacgacattttaatcaatggtaagaaagttgcaggcattttgttagatgcggaagtagagagtgagagtataaggcaggtaatcattggaataggcgtgaattccaacaatgatttggatcttaccaagcatatgatcaaagacaagaatagtggaatttttgattatgacattacaaccattaaacatgagaatcaaaatattgaaatttcaaaccatgattttatccagtatttcttgaaaagcattgatgatgtatttcaagacctaaagtcaagtgaattcgtggaggaattagaaaccttttacaagcataaaataatggaatcacagaagcatttgaaatacacgttttcggttggaggtaacaaatttaatggagaaataagaaaaatatacaatgatggatcattgcttgtaaagaacttagattccgaccgcgacagtgatttggttagaattaattcagtttatgatttgagtcagccgtgatctgagaattttgtaatagattctgactcttgactttaacctcttaagatcctatcatacctggcatcttaataggggatctaaacgctttatcgatacttatcccttctcctgtaaataccgaaacggtctttagaagagcgccctgcggaggagataaaataatggtctgacctggctcaatctttaacaaattttcagtcagattcttattgttatcatatactatgtaaatgtcatttagagcaagcttaccagtattttttaacactactcgagaattgaccaacagagactctgggtcctttaacgcatctacgtctagagaataatttttaaacggtataaaaatcaaaacattgtaaataacgactactaaaactacgacaattaatacaatcagtactagttcaactttattgattttcaatcccataattctacctgatatattttataaaaaagtattcctttttggttatttattattcctgccaataaaagatcaattttttctttgttaaattatccacatatttgtaaatttgatataacatggcaaattgaaatttatcgcattaatcaatagactgggtgtgcaaattacttacacattccatttatgaacctataaaaaaatttaaaaaattttttaccatcatgatagattcggaaaagactttcataatatatcacacatgaggtccccaatttttaaagttctgtagccaatcctatgaatgatttatgagcggtatgtaccagggattagataagatcgaattgggagctacagatatccggtacttttcactttaaattccataagttccaaagtatttggaattttatttgggtgactaaatagtgtaaaattgataactttaaatatgatttacatttataggtagttacatcgaccaaaccgaaggggaacatgtttagtgtaccgatattatcggtacactaagcaattatttacttattatctaggtaggaatttaaatgaatgaatcatatcatttgcagtattttcaaaggtattatatttatccaaggaagctttgtaggtgataatataaatattctcataattagaaactacaatttgcattgccttgcgattttgtaatttactgtccgttgctgtaaaaattactttcacagctttctttccgtccacagttaaggtatcagaagcttccaatttgaaatctttatgttctttttgaatttgagatataatcccttttgatgcagaatcggcagatacgttctttccaggtgtggaaactattttaactacaaggccagccggactactaactgaatctttatccttaggggcaatcagaattatttcattgtttagcttaacagacttatcccagttaatgggataatcaattgtgaagtgaaatttattatccgtataagttagcattgactgaccttgagcctcttgaaagaaacccaaaattaagagatccttacctgctaactgatataaattaaacaagaacacaagaataaccacggaaatcaaaatgttcccgatggatttttgtaaatatctgtgcggtatcgtcataatatcatacttttcaggtatttattaaatattcgaaaaattatacgattagactttgctgataaagaggcaataatttactttgatcttgaaatcgatacctctattgtagagacatttctgggtttatcatcttcagtgccagttagaacatctgaacctaacttcactttttctactctataacccaatgtattcattcttttcactattatttgagccacatccactgcccttgtgatgcttttacctcttgcttttattacgacagttggctcattagctagttggaccagagttgcagttacatacgtcattaatggttttttcccaataaaaatttcattgctttttctatttcccgattcgtatttgctatgagacattaaatatcatgcaaaattcaataatataatagtatatcacttatctaactcttctaaaatttcaattattttatccggatttaacattgccttttctacagtactcttatctgtaatttcataacaattgattatttcactttcgtccttaaagaatagaaaaattgaattgtcataaataatcgggtatagcttttctatgatcatagattcaggatttatctttatcttattctcaatatcaatttcgacaggatttttggtcatcttcgctcacaaaataaagcattacgataaatctattcttccagcttgctacggcataaattgatgtgaaaaattcatgttctacttatttacgaatagtagttcgccgactaactttattataaaaccaatcccgcctacagcacctatagccaataataccaatcttagatgggtgaaataatcgtccttgctagttttttttgctaatttaagagtttgaaaaatctcacctattcttttttgaactttatccagtattttttgaaatgagaacaattgatttctaagattctagatattcattataattttaatatttctaatttcaaaacccaatttaccaaaattactactcaaccaaaattttgattgctggtctgtatcgaataaaccggttccttatctgttcgctgcatctctacaaatgtctctgtagcctgaataccttctattttcccgattctctctattacaactttgtgaagctcctcaagagttcttgtatttaccgataatattatgtcgaaccgaccagtaacttctattagtgaccttatttctgggatcttaataagttcattatggataggttgttttaattttgggtcacgatttatgccgactgttgccttgatattgatacccaactgtgattcatttattataaccgtaaattttctgatgagttctcgtttggtaagcctttttattctgctatacaaaactgaggaattaatgtttaatttcttactaagctggggtattgaaatacttgcatcttttgtcaattctgacaaaattttcatatctaaatcatcgaatctttgcaagattgactctatcttataattattggttacattaataaatgtaattaaataatttgcttaaaatcataaatatatttaaaaattctggcatttttttttaatagaatattagtaaatattatattattagatctacaacttttcagtatgcttggaatgtctaaactacgccccgggaattttgtttttgtagtaaaaaaagatgaaaattcaaattatgtaataataggcaagattatttctgatcatgataaagttttcaaagttaggggtaccttctttaaaccagttggcctgcttgaaagaattaagtcagggagggctcagggaaaacctattgaagcaataaacaacccagagcctaacaattgtattttctttataatagatagattggataccggtgatttcgaagacattatcgacccaaaaatcgataaagtaattccaataaatgagaatagatattttgtactagatggttggattaaagaaagcttctcggaattatttagtaattactttagttcaacctcagaagaagagaaatcggaagcccggacgatattgataaaaaaaatgaattccttaatgtctcaggaattaaaggagcatgtttatgcagtggcacgcagttcacgaattttataaagttttatattatggacttgtcaaattttcttttatcatggaatatgtatatgctgctttattattacataaattaaagcaagatgtcaatgaagataatgtaaaaaatgtaattaaatcaactggtgttgaacctgatgatgttagagttaaatcattggttgccgctttaagtgaagttaacattgaggatgcattaaaggctgctccaattgccaccgctgccccagcaagtgcacaagctaccccagcagcttcaggctcaggagccgcagcaaaggaggacgaaaagaaggaagagaagaaagaagaagaagcattagaaggcttatcttctcttttcggctagtctttatccatctttttattttagaattatttattaatcagatcattttaaccaattctagttcgatattttaatcattaaaagttccagagcaatttagaggcatatagatcaccgataacccgatggtagcatactaggaaaataacagaagacagagcgtagatacaaaaatagaatagtaattttgaattcgaaatgggattactatttaaaagtaagggtcatttattggaagaataccctttggaatccaattggtgagccagattcgcagcaactgcgttggcctttagaatcgccagttcaatcgtgtcaggcgaggtatatccagattctgaagctagggacaatgcatgttgttttgcttttaagaggatcaaaggcattgattcctttgtaaagtaaactgcctctactgaaagggataaagcctcttggaaggattttattaactcctgcacataatctgaaacaactatctttaggtccttttccttgaattcgagtccttcagatattgcaaaattaactgaaactcctgcttctattggttttacatccaacttacttaataaagctgctaacttttgcgggataacatcacctgctttagctacaatggtatctttagaaacccagattgtaccctggtctatcttggtagggacattagattctttgaactctgacaaaactggacctggatttatccctgtattgccagcgggaatgacaagttcattaggggcaatatcgccgcctttagctgccatgaatattttgtttttatcaaaagttaaattcattttaaatggactaaggttggtaaacatcagcgcgcattggccttctagttccttgttgagaaattccaaccctttaacatccttaaaaatttcttcaaaagctctttgagcaaccttgttttttatagttattatcttgatctcgtttctgaattttttccttattgccatgagttgagctgaccttacttttgtcatcctagagagcgcaattacattataagattttgctagattttgcaaattttgatataaattaactttcctttctggataggatgttcttcctaacttattgatgatagctgtttgactcattatgattatccctatcgcttattttccaagggtacttgcttttaatgctttacccatggtaaattttattatagcatttctaaagttcttttctccttgagggagttttttttcaacggaagcgatgaccgcactggcatttgctaccaactgctcgtcggtcattgactcgtctcctatttttgttgacatatttaattggtttttggatcgtattcgtgttgatgatcttaaccttgatgctatgttttctatgggtgcgccgtaaggaacaggagtaggcattttaccttttggacctaaaaactgacctaatgatcgaccaacagatgacatcaaagtcgcatctgcaaggaaaaagtcgtaagagcgtacaatttttctggcttcccttcgatttgttccaatcctatctagagtatcaggttccatcacctggtcaacacctgctttctttgctcttaaccccatgtctcctgttgcgagcatacaaagtgaagatccctccttagttggattaggtaatactactatttcgttgacactaaatccttttttgacatcaatgtcttttaatactaaagttatttcagccgattgagcaaaatttctttttggagtggcctctcttgccttttttacaagctcctttaattgatcattgttaaacatgaatatataatgtagacgcgcaaaggccatttaaaatcgtttttacggcaattcaaatgtacggtcacagtcactcgccatcctaactggatccagtattttttcccattttctggtcaacctcgtattccataatccctattgactgcatcccttcatccaatttggtcagatcataattcagcgtctagtcgttaacgaaatagcaagataccaacccgagctaatgaccattctacaatttgcatccatgtctcataaaactgggactcattccttagtcaattaaaaataacttttgtaggattcataaaggaccacaaaaatccttcgtgataatcacatccgaatgacattgtattcagcaaatatgtctatagtttttccttttttcattaaattatttgccataggatgaataccattcctcaattctaattctaaagctccaaacattctccattctatactatccgaccagcatagagttgtatctttggatgaattacatgaaaagataaaacggagaaggacatcttcaaaagatgtcaattatcataaattactgattttatttatataattgattagtcttttatcaagaaaatcaaattgaaaatcagtaagcgagccccttctatatgtattaaatatatctctcctaaggttttccaatttgattatgctttcagttttgtcacctatgtcagcatcctgtatggctttattagttatctgaattagcttgttaaactttcttctctgtccacccttaaaaaaccatccaagtaaaacagaagccataccagttatacctcctattaggaaaatatattgttcagtcgaaagtgttggtctaaaattagcaacaatgttaccgtattcgcttgacttaaattttagagggttttcagtgctgtatgcaagtcctgaccacgagtcaaatgtgtatcctctttcaggcactgccgtgcaagtagcttcattgtcagttgtgataatagtactattttgatttagattttttataccattgcactctatgaatccagaattttccggactagtctcaaaccctattcttactatactttcatcctcttttccgtcgattattgaaagagtattggaagcagtattcgtaatgtaaactagattagtaatggggtctattgccacaaaacttgcaatcaatgggaattttatatttgtgggaattgtagaaggatatccttctctttcggtaattgaggagggatttactgggatatcttttattttctccaaggatgtttcgtttattacacttacagtattggatcctatgttactcacatataccttacctgtgagcggattaattttcacacctacgggaaactgaccagtctgaatggtctttaacacagtgccgtcagttccatttatcaaagtaagtgagtttgaagcgtaatttgtcacatagacaaggtttcttttctcataaatttcaattcctactggagaattgccagcagggatgctttttatgaaattgtaattatcttcatctatgactgtgatagttgaattagcaatgtttgaaacgtacaatttatttgattggggatcaatgccgataccataaggggtacttatgccgcttatcgtcctgataaccttattagttattccgtcaatcacagaaatcgaacttgaatcaatatttgtaacatacacccaattacttgattgatccacagcaacttgaaccggggatttaccgactgtaatattgtcgattactgaatccgtcgaaccatcaattaccgtaacgtcgtttgatcctctatttgtcacataaattctattattaaattgattcgcgtctatactatatggaaatatcccagtctgaatggtacttattaatttgtcagtttttgcatcaaataccgaaactgtattggaatactgatttgcgacatagattttattagtgaatggattcaaggttattcctaccggatagcttcctgtattgaatccagaaatgaacttcttttcatcttcctgagctattgccatattatttgctattgtattattgccttggtcaatgttcagccgtccagacgaatttattctgtctgtagcaggcggaggatcaaagtaaatttgtagattcaccaaggttaaaaaaataaatgacatgaaaatcagcaaccaagacttcatatactgactctgactttatcaattataattttttgtatcgcacttcataatatcaaaaagtgattaggaatattgttctcgataaatcatacttaacaattatatctgcaataatattattaaattacaagggatttaacaggcgtggtacaagtaaaaacccagggcttatcactagttgtacttttatgtttttatgtcatttttattttttcaattactccgtttatgaccagttttcctgggctgtcttttgaggtaactgatcaaaacaatgaaggtgtgtttagttctttaagtagaaattttgaacaaaccgttgaggagataaacaatgctgatgaaaagagcactacctcaacctcaccctcctcctcctcaaccgactcctcaaacaatgctgatgaaaagagcactgcttctaatgtcccaattgcagcttttgaatcttctaatctcattagcagcaattcgaccacaactgacgatttggagaaaaataatgaaaccggtttcatcaagtaaaattagtaagccatgcatctctatgctgaatcgggaattttaagtagaccaagtaattcaaagtaaccttagctactgaaatttgaattaacgattagaatttaggttgttcaatcctgaaggtactttaattttccattgaaaaaccttcgtaatcaattaatgcattaacgaatttcaatggtgcctttttttccagttaataaaggacaatgaattgacattcaatttgtaaatattaagaataggcgtttaagtaacattaattaaaatggtaacacacatgtgaattatttaattttgagtagatttacctcgttaacagaatttactaaaaaaagttaggaattccagatataaagaatgaactgtcctatgctactatatctgctattgcctcaccactcgaagtgctgtttgtagcattgtttattgctcctgtatcatcaatcgattgtaggcccttttcggcaagaacttcattcaacaaggtcgtatcatatatgcctgaaagattgggtcgatcttttcccttctctataaatccaaggtcatatgcgtcatttgcactcttaaagagggttaacttcaatggatcatatgtgagttctagattactgtaggccttatctaatacactttctgatatctcttgaccagtaagtttctttaattgagtattaaattcctttgctgctgctgccgtatcgttgtttatctttagtgtttcacctacgtgagcttcaagtaatttctttatgatttcaggattcttttcaagatagtctgttctgacaattaagttgccagttacaaacttaccatctggccataaacttttctcatcaacgaatactttaccgcctgcttcttgtactaatcttgttgcccaaggttcaggtacccatgctccatcaatttcacctttcaagaatactgttaatatatccgcatttgcaataggtaacactgttacgtttccaccattttctacagtattgaaaccattatcaatcaagtattttctcaaggccacatcttgtgtgttacctaattgaggggatgcaaatttctttccacctagatcgttgactgtttctatccctgaatcatttctaactatgaatgaggctccaccactagatgcaccagaaattactctaagatctttgcctcctgtaagaagatatccgtttatagcagggttaggaccaatgtaagtagcatcaattctatctgctaataacgattcaattgcagatgggccagcattaaatctaaatgtttcaacagtaacattatctcctaacgtcttctgaaaatctccattatttaatccaatcacggcttgtgaatgagtgatatttggaaagtacccaattctcaaagtctttttctcgtcacctaatgattgtgcactggcaatcgatatgggtgctgatatcaatgctattgtggtaataatcattgtaaaggcaaagataatttgtcttcctctattatcaaaattctttggaatcttgatacctactttttctgacttattaatcatcagtggtatagcgtttaacgttacttattattcattttcaatgtgccattttttttaatattgtgcagtttaagcatatattctgcgtcgaccgaaaagttataatataatgccatctatagctagggacacaattggctctatcattatgttgataatttagtacaagttattgattgaaggcaagcgatacgatctgcctgtaattaaatttgcaattatcgtgactcaaaatcaaaatttaaagaaacgcgattttgaaaaatgatgttagactttttgcctatcataatattaatgggtagaaaatacatacttgattttacgaaattgtactacctgacccttttcatctcggcagattagataaaaaccacctccgtttactaacaaatggtttaatttactgatgattagtaaattaaacaacaaaccatcattactgattatggaacgggactcagacctttgctcttcagtacttcgtttaaaagaccaagatcataaatacttgataaatctatttgacggctgcttcctagatttatatatcccaagtcgttagcgtcctcagctatcttgttaagcgatgctgagaggggatcgtaggtaaattctatccttgataatgcatcttttatttggtcctctggataagtcttaccagtaatgttctttagcccttcattaaatgcaaccattaattcttgaatatttttttcatccgcttcagtattattagtttttgataacttttgatttatccataatgtttcattgatatgtgcttcaagcagtttctttacaatttcgggattatctttaagataatccgttctagctaaaatattggctgtcacgaatttaccttctggaggccagagctccctttcgtcgaccaagataaatccttttccttgttcttttagaatggcacctaaaggttcaggtacccatgccccgtcaatctctttatttagaaacaatttgattatgtccgcgggttttgctgctaacactgttacgtttccaccattttctacagtattgaaaccattatcaatcaagtattttctcaaggccacatcttgtgtgttacctaattgaggggatgcaaatttctttccacctagatcgttgactgtttctatccctgaatcatttctaactatgaatgaggctccaccactagatgcaccagaaattacccgtaatccctctcctcccgaaacaatgtaaccattgatagtagggttaggaccaacataagctacatcaatctgtcctgcatagagagcttcaattgccgagggaccggttgtaaaaacaaactcttttactgaaatgttacctaaattcttgtcgttttctattatatgtctaaaatctccattgtttaggccaattatggcttgagcatgattcaaatttggaaaatatccaatttttaaagaatcagtcttcgcatttacggtttgactggtagatccagttggactattatcctgacccatcaataatgaccaataaaaattataattagaagatatgataactacgataattatggcaaatgaaatacccaactttaattttgaatccatgttattttttttgtaaatgggatgtattaataatcagaaataggcaaaaaatgtatattacacgtggttttagcaataatgttgtaatactgactcacaaagggttattttcagtatttcaactcccttatcctaactcatcacggttcattaaaagggccctgttaacttaagcatttgaaatagagtgaatttgagttgtcattggaccaaacaggacaatatcgacaagattccactgtattttgagcacgatttatgaccttttgttctgatataattcctcttaatctatatgaaatactgggaagcatttgaaaaattaccttaaattaacagggctattaaaagtatgtgtaggagaataagtgatgttaggtcaaaatgaaatcatttattttcaatgtcctgctcttgtcttaatccccatttctctcttaccctttcttctagttttgcaaagattactttatcaaataacattcctaatgcgaaaatagtaatcatagatgctattatctgatccatcagttggaattctctacctactagtagtatgtgtcctatccctaccgcagcagccataagtatttccgctccaatcaaagcgtgccaagcaaatgaccacgcttgttttattcctattattaatgcaggagtggctgctggtatcattaagtatctaaataatgagaaacctttagctcccatatttcttgcagcctttagatatatgggcggtatgtttcttattccactgtaagcagacatcataactgaaaatactgaactcattatgactacaaataatattcctatatcatttagaccgataagcaggatagcaaatggaacccaagcaacactcggaaaagactgtaatcctaccgcaaaagaactcattgtttttccaaagccactaaatcttaccattgcaagtcccacacaaaccccgattcctattgatgcagcaaatccaatcaagagcctataaagagtcattcctatgcttatcgtcagagtgctatctagagttaggtcataaaacgattctactaccattataggagatggtagtgatacttttggccaaatgccacttaaatacgcgagttgccataggccaataaaaactgcaataaataaaatggtatttgagaattcatccaacctgattttttttttcaagggaatcttgcttttatttgggcttttttcatctaaagaaatgatttctgattcttcgatggaatgcgattcatctaaatcattttcaataccttccttatttttccgtttattttcgtcatcttcaggagccctgtacaaagaaatcctgtttattattaggcctcccgtatatcaattttcttaggctttttacaaatttaacttcttcagtgcataatcactatcacaacttacctaacttgaaatcgaccattcaattagattagttatcagtggaccatcaaattagttatcaacttttttcgtttcttgccattatttgaaaattattttaagaaaaatcggttctgatattggacattcgttcaaaattttctaaaactgtaataaagaaaacaaaatcaaaataatatcctgaaggaatattgtaagaacaatgatacaataatgatttcgttatgtgtcttaagttagcctgtaattattatatccattctgccttgaccaaattgtagactttttttcttgtatcgtctaagctattcttttcaattatcaaaccttgttctttgagttcttcgactgaagcttgaactgttcttcgtggtagattggtaacatagatcaattcgctttgatcaatagggtgcttactcctaattatgtagtgaataaattttgtggcaggactaccttcaggacctttcttgactggagtaatgctgaagcttgccttagataggaaacctctcctttgggactctatagataatacattattgagttttatctcacccatatttactcgttgtccaaattctgctactaatactgcttgctgaatctctaacggagcctcaaaaattatgctgttaggattaatttttgaagtaatagcggaaagtaaattccatttgatatctcctttttcatcatagatacccacgttgtaccccaaatttgcttccaggactattttttcttggctaatctctagaatttcattcatcttctttattgtttcatcaaccgatagttgtcttctgggatctttgtgcccgattttccattgaaccctcatatcatacgaatcaactattttttggatcttctttttttcctcaaaggcaagatgaatactattttcacttatttcaattatatcaaacccaattgtttttgcactctccataaatttttcaaacactttttcacgtatcgcgtattcggtcaacgtactccctgtagaaactagaacatttgattgatggtaaaaatcaattctattaatgagactttgttgttttagaagaagaggaaatgctccatatatcttgaccatgtcaatataaggagatatagtttcaaaattctctttgtcaagaccttgaaatttgtctataatgtatgtaataccatcatgacggggttttttatgatctattctgtcctcaatcagggtttctagcatgaatggatgtatgcagaatttacatataattaaattgatatatgcatttttgaaagtatacaccagacaagaagcattaattttcgcacaagatgtcaaattgacacattatcaaagttacttcttttatcactttatttcacttcaatttagtctattattatctaatacagctacttctaggttccatgactcaacctatcaagtgggttaattctgactatgtatgttttattatgttttaacagattatttgggcttatgtctagtagtaacataccgactgtaactaatattccattacaagaactaaaccgggtttctaattgataccttagttgactcctttcttttaaatggactgacaataataccttgaaaagcatccattttcaaggattgttattattcagtaaaaattatgcgaaatattgtattaatataaaaacaaaataaacgggggaaaattagtattgagacaaatagatattttgctgcctttgataatgacttctgttttaccacattaccctgattttgtagtgttagaatccttaacattaatttactttggaaataattgggcggtctagattttgattaatggtttcaaactctgtgataggaccatttacaaataagtcatttgattcagaaataatttctcgggtaagtgattccacaagaggatgatcaatactgcgtggtctcggtatgttcaccacaacttgcttttttatgttcgccaattttggagacataacaataactctgtcacccaatgccactgcctcatgaatgttatgagttacaaacaaaatagtccttttggtttcttggtgaatcctcaatagatgtgaataaagcatttttctagtctgaacatctaaagcagcgaaaggttcatccattaacaaaatcttaggatccaacgccaatgctctggcgatcgcaactctttgtttcattcctcccgatagctgatgaatataggcatgggtaaaattggtcaattgaatcatatcaattaatttcatgactttttcttccctcttatcttttgcaatttttgcaatttttaaaccaaattctatattttcatatactgttaaccagggaaataaagctccttcctgaaaaactactacccgatccgtgcttggagatagagcaataggtttatcatcaactagtatctcaccatcaaatttattatctagacccgcaaccaaattaagtaacgtactttttccacacccagaaggacctacaatagtaacaaactctccatttttgatgttcaaactaagtttattgataaccgtatgtttggaattaatcttgttctttttttcagtatatcctttagaaatgttttcgagttttaaaattgaagtatcaatagattgaataggatttgctaaactagacataattattaaataaacagaaaattatataattaaatccctatatgcaacattcgccgatatgtgccagaattgcacacttaatgatgattatgcgtcttttaggaaaaaaagaaaaaaattgtatagtcaatatttggtatatatcatggtttatgtcatgatacaatatcgattattcctaaatcgatgccatatttatttatcctacaaaaaggtagtgataacgaaggaatttaaaatcggttatttgagattattttaaagtccaaatttacgattcgggatatttttgtcgttaatgtggtttacaaaattgtttgttaatcatcaataatttatagatcgataggtaattcacttgtcaatatttaccccttttgttaaatcaaatcaaatgatgacaaggattcagacttcagaccctgttgtatattggaatttggtataaacaattttcaaaataagttcctatatgcaagatctgcatctattagctaaatctggcatattattaaacggatccaaatatactaattacattatattttattaggaatgatccgttttatggatttattcatataaacccgttacttttttgtattttttttataaagagagtttaataactatgaaataccaagtattgatgattggcagtcccatccaatcacaaagatactccacgaaggaacacaaaagcagtacgtattcattatagtagtgattcaggtaatacctaaatcgatgccagcacatcgttaaggttatcaacctgaatcacaatatctctagcataaaaagtaggatactcaacaaggtttatggacaggccatcatatttagaaattgtagtattctctaaaagtgactaaatgatgccatctctctctgtagcttaataaaaaaccatagcaaatactaaaaaagagtgattttgactatttggattaaaaaccatcaagagcttcggttatatcttacatacatctgtctgtttagcttttctaatattacgaacgaaactgacttttaacactaatctacatgcgaattgtggataccagatttaataacccttttgagaccaggcaactgtcacaataagggtctctgatcttcagtaaactgctacgtgagaatcatatgtatattcaaaaaccaatgctccaataaataaatataacaggataacataattttctttgcttctatttgtaatttcaatagggacatttctcctctatcagttctcacatttttttatagattttgctggtacgcctgcaacaatgtcttcatctacaatatcataaataacagaactgcctgaacccacaataacttgttcgcctatttttatcttattttttatagtactatttagccctaaccaacaattattgccaatgatagtactaccacctactatagttccagctgttaactcggtattttttccaatattgacattatgagctatatggcataaagcatcaattttggttccttgtcctataatcgtgtcagagagagatcctcgtgcgatagagcaatttgcaaatacttctacatcgttttctatcaccactttaccataatgagggaatttttctagatctaaagtatcacatgctctttcaaatgcaaatccatcagaaccaatggttgtatttggttggatagaacaattatctcctactttacaattttgcaaatttgcttttgattctattatagtattattaccaatagaacaattatcaccgataactacgtagtcaccaatataacaatcccttcctatctttgctgaatcggctataacagaacttttggaaataccaaccttaggcaaagcatgggtaatacgctttgcaagtcttgtaaattcaagtctaggattatcaacaaatatcaatagttgtccgtccttgtgatttggatataccagcccctccatactttttttacaaagtatcacaccagcgtttgattgtgaaatagagagcatgcctctgtattcctcagatgaacaaaatgaaacataccaatagtttcctttgtataaagagggcaaactttttgtcaattttgatgttattgatgaatcctggccttctaacgtatatcctgaatcagtaaggtgctgcaataatgattcaacggtccacaattgtacaattcatcctcatctttgttccctatttttgctttgaataaaacttgtaatttgagtaaactaaaaagaaaatcttatccatctaatttcttttagtttgcaaaagggacaaagcattttgtgactgtctaaataaatacttcccgttgtttcagaaaaagaggcattccaagaacattggttgcatctcaaagtatatttgaaagtcgaaggcttcaaatacatgtccagattatccttttcaattcttaatccagcggaatgatttagttgcaaactcatgagtagttattacaataattgtaataaaaggaatgttgtatatgatatattggaatagtatacgcaaataattcacattctataagatttagttttggaatttatgcaacgcgtacaacaatacaaacacaagtgactcaagtacttgttactattaattaaggagatcctttcagaatccttataaataatatgctgtttgtggttaattaatccatgtaaatgagaaaatagaaaaatttgaaagagtataaaaataatctgtctttacttatctcatcatgtttctacattcttgggcacatttcttacacatttcagcacattctttacatgcttccattttgttacccattttttcacattccattgcacatgcgtcacatatggtagcacacatttcacacatttgctttgagtattcgcttccacgagccatcatcattgctgccattgtacacatcgaagcacagtctctacacatcatcatacatcggcccatcataccggccatttcagtgttggacatacatgcagtacaacaggcttcgcacatcattgcgcattcgttgcaagtgtcaatacaagtttggttcttttgattaataagagtagtgttcataccattaataagttaaaaatattatataaacttatctaaaaaatatgagaaaaacgtaaaatatatgcaaatattgcgtataaattatgaaaaaataaaagaattataaaataaatatgtgatttaaacatatagcgatatacatactaacgtcgtcgatttaattttatcgtacttgtttattaactagtgaattaatatcaaaccaaaccaactatgcaatggaaaagtcgaaataattttgtaagatttgtgtaccggatttttaaatgctaattacatttgaactgatcaggtttattaaaaatgatatcaagacgtaagatctcaacacattagatctttagattaaaaaatgttccttagtacaataaaaagactagagcgattaatacttatactgatcgtctctcttttatctttttttggaaaacatgagtatcagaaattcaatgaatgatttctttattttatttctttaattctgccagttcttacatcatatacaaacccagttactgaagcaacgtcaattatgaatggagtattccgaattttgtcaacttgctttcttacattttcttctaaatcgtcaaatgaatgaaatactatgcctgaagcattcgaattgtatttttccgagattttctcttgtaggtcttggtcactaaaggtcaacatgccacagtctgtatgatttattacaaagaattcttctgttcctaataattcgtgagagattattaatgagcgtatggcatcttcggtagcaatcccaccagcattcctaataatgtgggcttcgccgaccccgaggcctaataaatcatttacattcaaccttgcatccatgcatgcgaggacggcaatttttttttgagggaggcaatagcagatctccatgcttgaaacttttagggtattcctcattctgagattttatcgactccaattgtgtcataaaattatatggtttataaatatagaattaccttccgaaataggttatttaggtctttttcatgtaaaaatttcatcttggaccataaattggcgtatatcttgactgctttatgttgtcttttttagagagcatatgtcgaagccaaaaaatttaggattaaagtttatagtaaaataaactggtaaacaagccaaacatcagataaaacaatttatccttgtaaatacaattaagtatatacctagaaaaagggttgtaggtttacctttaaagtgaccggtaaataaaaccctttacatgcccaacaatgttccaaattttctgtaattggggcctcgaacctactaatgaaattgattcatataaatcaataaaaaattctcctgtcactattccaaaattatattaaagttaacaaattctcaattctttacaaattaaatcgtaaatcttaattgtttggatatgatcccatccctatcaaaaaaaattctagttatttccaattcatgatttcaatgcttgatgggttattatctaggactctaatttagaccacttaaaagtttacggtgattcaagatttagcgttaattgtaactgagaaatctcgttgtctatgatttgtgtatcttcacttgatctaatttgcttggtaagtttcctgcaagcttggatttgagtccgatagatttctgtcttttccagatagagactattaagaggctctatgaacgaatataagatttctctccttttcgaattaccgccaatttttgcatctatttggactagtgcttccccttcaagttccctcatctattttgccccctttgtatcttgtatattattgatttgtggactggtttgccagttttactttctaaaaagcaagtcattaaagaataaagaagaccattttttttcttggttaatgttattttatgcatgtgtattaagatataaaacgtacacataaaaaggattttaaatatgcaaaaaaatacaaatctaagcagacaacaagcttatttacattaatttccattttgaagtttggaatttcactcggattcggatctaagaatatgaaatgatgatatacaaaattaatccgagtcagaaaaatttgttccctaatttgtacggaggcatattaaaataatattctgaaggggttcaaattaatatagattacttaagaagttaatcctaatcaaaatatatagtgctaatgaggaattgatctcataaatggataaataagttagaaaaatgttttagagtcggcttatatttgctctatcaaaataactcaacatatgtttttagtaatttaaaaaatccactatgttatttatcactatcgagttagctcagtgacatttatatttcaaataatttgataacaaaacatactcagataaaatctaatgatatagtgacttacataatttgcatataattacagaatttttcacataacagaatgatattaagtatcaacaggactattattattgtaataattaatgtcattcggaattttcaaagaaattgaaagactagttgagtatattcccattgagacggatatggacggaataggcaaattatcaagtgatgctgatatcgactctcaattttattttgaagatcttgatagaatagctgtaagactaggaatcttggaaattggaaaaagcaccataagtctgcgagacataattaaactgttaaacaaatttctaaaggatgcaaaagttgaggagtttgtagaaagccctcgaaaatatgaacaattgttgaccagtgggtctggtttgccattgaaaaatttgttatttgaatttagtctatcggccttagctggggataagttggatgcaaaaatatatttaactcatacatatcatatcttgggtctgagaagaagtttagtcctcctcctttcaattattgtaaatgaaattgagaacacaaaatacgatgctgacgtaagagaactattcacgcttttagctctgatgtcggagccaaataatgttgatatccattttagtatagacgaaaatgggtttagcaaaagatatagcggatacttacaagaacttcaaaaattaacattacctaagagaggtacagatccaattgatcttcattccataagattctattagaacgataatactttttagatcttacattaataaatttttacctcattttattccagttaaattcatataaattgtaaccataaatgatagaatacacaaaataggtacagatcttacggagttatctaatgaatatgaaaatttcacaccattctaaattattttgcatatttgagagtagtaatatacaggttaaatcaattaatcataatggaaaataaagaaatttcatataaaaaatatttaggactggcagccgttatttttgcagtcgtactagtaactagtaacttcggcgctgctttctcacaaaacaatactgatgagctcgtaaatctaaatttgacgggtggtgacgtcctcacaagccctaattcaactgggacagatgctagctctaacgggactgattctaattcaacatatacccactaatagacaatcggtctaaagcatcaccttttttttaaatactaataatttttgcgttattaatccctgtacttgagaaagcggtaacaaataatactgactattatgttcacaatacataaaacctgcaatctacgaagaccaatttatttgctagatatgagatcaatttacccataaacagacaaaccttcacatatcacaagtatattattaccaaattactattattactttatcgcattctatcagatgcggtacaagaactttaatcatgcatattgcaggcaaggtaggagcaaagaagatgaaaaataaaaatctctcatggtagtatcatgtagtgaagtgctgtaagctcgcctctacttttctgcaatattttgttctttaaaagatgttaacattgtttagtatggataattaaataattgaaaacctaagtagtgattaaatatgacattcgaatttttctcaaaaatagattgtagtaacttagtacacttaagcaaaacagtacaattagccgtctatctcagaacattatttgttactacgacaaaagttaataaatatacatttttgattcgaaagcaatctagaaagatatcttacacaagacaataaacttgaactggtttatttaattcgagttgtatgactatagtgaatctagattgggtccgtccaagtcagattcagagcgtggtcttgcattaactatgatttattatacaggttaagtcctaaaattgaacctgactatgtgagaatttttgtttcttcccagggtttattttaatcgtttagaaactgaccaagtagttacttcaaattagcgattttcaaaaggactaaccaacagacataatcaaaagttggtcagtatcgtatgaaatagtaaaggcgtcatttggaagttcacgttgggaactttctcatgctttagtatctttcttatggtagcagctgttttatcgatcaaaaaaagccttcgtaaggacactactcacgtgagtcatttgattggaatatgtgagcaacacgatttaattttcctttaatagacacttattacacgattgtagcctttaccacttcattacagtatcaggcctttgagacctgatgattttcgcctatttctaggagtctgagtctgagtctgagtgcaagtttagtaagcacattgggtatttatttttgatctaaattatcattttgtattctcaggattgaaactaacaattgatttggtctggtggttcctcaacgtagaatttgtctaccagctattcttatcctcatacctaaaaacctgtaagatagtagcattatttaagaaatgagttaccgttttttaaaatataaaattgactatttataaccacgttgacggattactgtactagacatttaaagtatgttgcacttatatcattacatgacatctgacgaatttgaaaataaaaaaagagacactaagagtgctcttgatgaaacaggagataaactagaagcaggcgcaaaagcagtagcaaataagctcggtgatactgacaaagacatgggaacagagtataaaaaagaaaagttaaaagaggatttggaataaatttcttatttcaaatttataattcatagtctcattcaatcagagataagccacttgttaaaatcatttttgataggcatagtatcgaatactagaataattccatattaactgtcaaaaataaagaattacaaaaatggtattagttaatgttgtttaatatatattccattaatctgttactagatgccgaatagtaatcaaggttttcgcccatacactcgggacatttgttggacagaatcaatctactatggttaatcaccccaaccgaagaatgataatagcaggttttacagcgaataatttgtgtccgtccttgtccagtcatgatattttcacatggtaactgattgtgggacagtgttcctcgttcacctcttacaacttttttttgtattttttgtaatctcttattcctgtctgactttgtcagtacagattttgtcaaagacataggtaatatgacagagaattatgatttaattagatctctacgagcaatgaaaatcatatatatgaaatttatgccaataattattcgatttacttttagttatgcatcatccaaagaactaatccaaaatcgatgcataattcacacatttctgtaaaaaaatacaccaaccaatgcaaagatatgaaatgaatactcaatttaggtattggcacaaacaactaaaattaaatattcttatcgggaagtacaggataatacgcaatgagttgaagtacattaaacgatcctaatataagaatagtagaacttgactatgattctcaagctatttgctttcttggtcatatcccaggagcaattctgcttgaatagaaaaatgacataactcatcctatctcaagggaaattctttctgcggaaagttacaataaaatcatattctcaattttagaaaggcatacttcgatcttcatgtaatcagactaaatcaatctaattcttggtgaaactggttcgagtcaggattttctaatatcctcagtttatttattccatgctgtatttaagagtaggctaaaagtcaaaataaatttattccacccagtttagccgatgaagttagcgattctcacgtattgcagaatacgctagtcggaatcatgcaagtagatttattaatttcggtaaggctctagtccctaaattagcaggttaacaggattgcgaattggaaaattatatagtaaatacaaggattatgtcttatttaataaaaacatactaatttcaggtatttttgccttctttgctggtgctatctttacgcagtttttttctgaattcaattccgacagcctatcaaactcgattgttactctaatcatggagtattgtgtttacattcctattttttcatatttgttctatctggacaataaataccgctatattaacaaggagactgggaaaaaaaattatagtaagattaagaccgatatcaagaagctgattgcagcatttgcaatttctgaagctatctattcgatttcgaaagtactgattcattatcagttgttaacccttggtttcattgaaccataccagacctccatgatagcttccataatagcttggataattttcctgttggttattaatctaagtataaaagcagttcgcctctttaagtcaaaataagtcattgaatttggagaaatacatctattgtccctatttttaggagtatttatccaatttagtcaaatttttgtaaatactccccgctattaatattacccatcgatattaaataaaggcatgagaatcggtgcggggattgtattttttgatgacgctaaaggcttgaagagatgtctacattcaattgcatccaacgttgatttagttataaccattgatggaaagtttaaggaatttgatgaggactatgacattagcattgatggttctagggaggttgtagagtcatttcctaatacgagatattattgttatccaaacattactgagatagaaaaaagaaacaaatatctagagatcgctgcaaaattgggaattgattttttgatcgtaatagattcagatgagtatgctgtaatagataaagaggaactgaggagaaatttgcatttcataaaggctgggaaggaattgtcggaaacttgcaatgaatttattcctgaagtttatggaataaagatgtttgatgaacaatatgaaaaacagaacatgattatagaaagatataacgaaaggttactttacaaacccggataccttcgatattctgcgatccatagcaatttaatagatatcaataacaggaataggaattttactacgtcaaaatatactagtgaaatcgacgggatcacattatataatgatgatcgtcttagaagctcaagttatattagtaaaagtttaaaatatcaaacctatctgtttaattccgaaaggatggaaagaaaaagaatagtaggatatgagacattaagatacaaataatcctagtgtatttctacaagaaaatttgtttcgctgacgccctaatttgaagccaaatatgataattggtcaaggatttgtcgagccttagcagcgcttttttccttgtcttttatttcaagcataaggtcgtaactatgatcaattgtcgaagataaaaagttcttgaacttcattacatccaaagtattagcatgttttcctttcctgaaatttggttcttgattactatagtctatcatcagtaccccatctctgtctttctcccacgtatggtctgcggaactaatggcatctcgtaccgatcggccctcgttcttacattcgtggtgaaatacatccaacaagacaggaacattcgttttgtcgtgtatttttaagcaatcatttagactaaaacgataatcatcattttcgattgccattctagacctaacttcatcagataagagtgtattatagtttttgatgaacctatccaatgaggagattttgtcatcataagttcctccaacgtggatctgaatttttgcagtgttatttagcttcattgcgttgaggagggcactttggtaattgatttctcttattcctttttctacaacttcattatttggtgaattcaatatgataaattggtctgggtgcatggaaattctgattttcttctccttaacaatttgaccgatataaaacaaatctttcttgaaataattttcccaatcaaatttgcatattgggtgtgaagcgaatggaattatatcagaactgattctaaaaaacaggaaatcatgttgaatattatagttcaagatatctttgagtacctcaagattataactgactgccttgattaatctttcttcagagtacgaagatattctaaatgtggaaatagttttttttcctaacgattggttaatgcaaggatatcctattttcattaattagactttttcttccaaaaattgttggaggtttgatttagtaatgaaagattcgccactagtatcagattccaaaatcgttttggctattattactaaggacctcttgatatttgatgttttgtattttgggtcggttacagggtataatctcacagttatcttatcagactttttgatcaattgaataaaataattctgggtaaaactgggttcgattgttatagtatttattagaatagtatctttagaaacactttgaaatgattccttaaaattataaatgcaacctccatcgagggtgcttctaataatccaacctttaaagtcactatgaatcaggtcaaagttgacccgactatttatgataatgtgaggcattattcaaaaagagtttttttattgtttacccgggaacaataataaaatcagacctaagaaaattcttttgactttattctcgattcttatttctttattgaacggggtgggaaaaaaatgattcaatattagtaaaaacctccaagaataaatcgattccaaataatactatactttgaggacaaattatctaaagtcaatagttcattcgcactccttgtaaggttttgagctccatcattctacccgaaatgtatcccaaaagtaccccgtaaatgatatgaaaagctagggaacccagtatgattatagggtaaagaccttcaaaatttgtgactattgaatatacatattgattgggggtcattgaatttttaaatgaatcgatcatcggttgaatagcgaatgttgctactggtacaaataacaatgtccataaaagtactcccacaataatcccagttaccaagccatgccttgcattataaggagagatgcgacgccaaaatattgatacttgcccaaaaatattaccagcgatggtacctgttaataagtgtaaagcaaaaccaattaatggagctgcagcgggatcatagaaacccagcgatactcctattattccaaaaaatgaaccaggtggcgtttgggaaataacatctattgaaactaacaatcctgatattccccaagatgcaatgaaacctgctagggaacaataaagtatgaacatttttggggaatcttcaattttggattttaacatagcctgatatggataatctattatttaagaaatagtaaaaatgataccataatgcctaactctttataacacctgtttcatttcccagcattctttagaaaggtgctcaatacttattctagcacctaagagtattttttaattctcaaaatttgcttggatttattgacgctctaggaatccctgctccgtcttattttcaatctgacggcccaaaagaagtcttacagcatcctctaaattggtattcatgaaggggtaaccagaagtcaatagcttttggggttttacaacaccattggaatcgctaatggtatctgcgaaatctccaaccgctagtttcatggatccatagccaattctcaaaaaaatctgattttctaatatttttgaaatagtttcaaaaaaatctgaagcctttaccgggttgggagacactacgttaataggtccacggatgttagtgtttccaatcacgtataagatacatcctatgacatcctcaattgatacccaattaagaacgttggttcctttaccaaatcctattcctgtttttaagtaagaagtaagagtaagtggtttcaatattcctccccttggagatagtattagaccaaaacgggcatttatcaccctgatacctatagcttcaacagattttgaatgcgattcccagtcaacacacaagttggctagaaacccatctcctgctgtagtttcttctgtgacaacctcttcgccacgatttccgtaataaccaattgctgaagcacataataaagttgaaggaggttttttaagtttctttaaggtgttgcataatagctcggttgttttcactcggctatcacgtatgcgctttttctttgattctgaccatctaccacctaggttttctccggacaaatggataacaatgtcaaatccttctagatcaactgggtcaatcataccagtttcaggatcccaaattctgaaatttgaactgttatcgctctcagggtatttcgaagtgggccttaccaattttgaaatcttgtgttctccaacggtttctagaaaaggaatcagagcagatccaattagcccagtagatccgctaattagaattctttttcccctattctcctttagcaggccccataatttcaaatcattttgcaatattcgatgtcgatagctgaacatttgaattagggttttattgattcgattcctgaaaatactaaatctatttaatccgtatggtaaagaatactttattttgtcttccattatacatccgcttatttcattaggagcaaacgagtgggtatgcatccaagtctttaacggccccttgatcatttcatcttgaaatatttgatcttgaatgtatccaaagtgctttgcaatccattttaattttagcggtccatattgcaatactagaatacaaattgctccattttctagcccattatttcgtttaataatttttagaaaactccaaggtgggatcattctatctattgccctatatcttgcatgataattgaaggcatcatgtacctcataagggatttcaacccgtttcgtaaaaattgcgggtttgtttgatgaatcgcttgaatctttcaataaaatgatctaaatctagtattcaccttaatctgttttttgcaataaaattaaagtgttggcagcagaaaaatacacatagataaataaaactatctttaagtttcgtatgtatagtatgttttttcgctattgctgatcttttttgtttcaaaaatagataattcttttcattcatcctcttctagtcgatttgatctcttcaaagcaaattaaatagatattaaaaggctaactgacaactcataaacctagaataacatattcaaattcaaaaactgttatctttattgttttcatcatattggccgtaaaatggatgttgcaagctagccaattgtttccgaagcattgtattatccatttgaaaactatttttgccaatccaatgaatttacttagccctcgagtagtcaatatatctaagagggatgagggaaatgaattttgatacattcaagatgcaaatcctcaatttttgaattcatataaatttatgggacactattttgtttaattagaacctgagatataggaaaatatgaaaaattatgccaaacaacagacggatgctttttacactgggcagaccttaattctatgcaaggatagtcatgatctgcttcacaataggtcggatcattctgaacttataggggcgcttaatttggcaccaaaaacaagagaatttgaatattttgagatatcaattcagagattggagaatgagatataaattgaagaatgatgaaatgtggccaacgcttcctgttgcttcctggaaggaaacatatgcaacgttgcatatgttaacacaaatcgtgggcaagatccggcttgcaacaaccccaatggaaaatcattggtggaactctacactatatgttacaccaaacgggctaaccacatccgtgatgtactataatgatatcccttttaaaatcgaatttgatttgaacaaacatttcttaattattgagcaagcttttggttacgttaagaaaattcccctagagtcaaagccagtagcagattattataaggatataatgtcaacactggaatcaattggtatttcattaaggatctggagtacgccagttgaggtggaaaatggaattccatttgagaaagattatagccattcaacctatgacagtgattcggccaacaaattttggcggatacttatacagtcttcacgattatttacagaatttagatcaagttttttgggcaaggtcagtccagttcattttttttggggagcttttgatttggctgtaactcgtttttctggacgaagagctcctgttcatcctggtgttcctaactgtccgcaacatgtaatggtcgaagcatattctcatgaagttagcagttgtggattatggccaggaggtggaccatttgaaggaccagtatattattcgtattcataccctgagcctaagggattcaaagacgctaaagtcgagcctgcaggagcgtattacgaggtcagcatgggagaatttattttgccttacgagaatgttcggaaaagcgaatcaccagatcgatcattactttgcttccttaagagtacttatgaagctgcggctgaggcagcaaagtgggaacgtaccatgttggaaagacaataacagtcatatttgagtcctatattgaattatcagtatgccttggcttgagaggctaccaatctattccatgccaattcaaatgataaattacaatattaagcataatttcgctgttaataccatctccctaagccacataattccaaaaccatatatcggatacatcataaaattttaaaataattcttcttgtatatgtttgaattaagtatgttgcaggacaaaaagaccagatgttttctattatttcagaactaagttttatcatttcttgagaagcagcaatattattccatgcagttacacctttctagtttaacccctttgatttggattatatctaataccttgcttgtcaactggataaaacaactaataagatatgaatgatggttctcactttctattcaaatttttgaactcacctattcctataacattgtctttaatttccgaatcttcattccatttcggtgacggaaatgacaattctctgttctctaataatatcctttattgtcctaaagacgattgcagctttgagcttctgtaaatgactagaattaaatgtctttaacagaaagatcattgaggttcttgttattaactaccttacattttttagttagtggtatttatattaggataaataattttaaagtcatctttcatgctgacggtaatccagtttcggttttgtgcttctattagcgcattttcagcatgtatgtcataggaatattctctcatggcatcatcgtgatggactagaatttgaagtgatctgcccgggatgttatcgctgaattattagtttgttgtgattgcctatactggcatcgcccattttactaaacagcatgagaacagctgattgcggctcaaaaacctgatggtagtgttcctggatttagcaaatcaatgattataaatgataaaaatcttggttcttctaaattaaaaatattttgaaaattactatcatacaactatagtaactgcgttggcatatatattacgacgtgatagcagcgatatgaatgattttggcgtatctgtttatagcctaaactataggcgtgttttaaatgcgattcctttgatatagtctataaaccaaaccccccttatcttcaattatgtaaatatattcttcatttgaattttgagatgtgatttgtggttggcctattttccttccctcaatattggtcatacgcgttcacatctattgtataaacagaatccagccagttaaaagctccttgaatcccattctccgaaagtattcttcctaagttatattgcactaatctacggggttctgtgagatgcaatacacttttgattgcaacttcaagtagataattatgatgtgctgattctaaactctgtcaaaagacgaatattattcgtaaagacttttggtttgagtagacattcgtatctcgcaataataataaatctttttacgatataattgactatctatcttggtaattgtctttagaaggtaaacgggtcttaattttgggtgcaggattcggcggattaacaactgctaatttattgcagaaaaatctttctttatcctcagtaaaacatcaaattagtattgtcgactccaaagactatttcataatgggacttgtaaatttatggattttaagtggaataagaacactggatgattctaaaatagcattaagcaggctagaaaataaaggaataagatatttaaatgctgaagtaaaggcaattgatcctgtctcaaggactgtgacactcaaagggaattcgactcctagattagaatatgactatttggtgatagcattaggatcagagtttgcacttgaacatgtcaagggatttttagaaaatggtggtactaatctatatgatgcagagcaaattccaaaattaagagaaaagatactttcgttaaaaaaggggagaatagcaatatgcataacctctgttccatacaaatgcccaccagcaccatatgaggcatctctccttatcaatgatattttagttaagaatggtacaagggattcaattgatatcgaaatttatacacctactccaattgctttgcctgtagccggagcacaagtgagtcatgaagttattaaccttctcaatgataaccatgtcaatttccatccgttacataaaataaagtcagtatcagacacaaaagagatagaatttgaaaatggacatagggtaaaatatgatttgttgataggtatccctcctcataaagttcctgaagtaataaggaattctgatctagtaaagcaaggacaaaactggattaatgtcgacaagttcagtcttaagacagattatcaaaatgtttttgcgataggagatgtaaatgaaattaaagtaactgaaattgtgactattcctaaagctggagtatttgcagaagctcaggcgaaggtagttagccaacaaattattgatgatatagaaaacaacaaggataaacgatcatcatcaaaatttgatggaaaaggtttttgttttatggaagttggaagtaagaaggcagggtatatttccgcagatttttataatgaaaatggtcctgtcactctacttgagccaccatctaaggaatcatacgaaaagaaattaaattttgaaagaagtaaggtaagtgagtggttattatcgtagtccgctacctgtgtgtctcctgttcttttacttaagccactaagggttgctcttctactttctcaatctctggttgctgttcttcttcctcatcaactaacttatcaattttcctcttgaagagtttgctatattcgtagtctgatatgaatacgcacatacaatcgtctcctgtagtatattacttaaacagattcctaacggattattttacatgacaatatatctccaggattagatgaattagtatttgattccattagaatgaattacacgtatatcgaaatttacattaatcttataaatcaagatttaggggtcataagtatgacctctttaactcctgaagaactacttacaactacaagagctgtgagaaagagacttgatcttgaaaaacctgtagaaattgaattagttaaaaaatgcatagaaatagcccagcaggccccaacggcttccaatagacagaattggcactttttgattattactgatcaatccatgaagaattcattatccgatctctttagaaaaggatggcaatcctatatagattcaccaacttctgttgcaaagactataagttctgatgatccaaagaaaagtgaaactcaaaggaaaatatatgaatctgcgaaatatttggtagacaatttaagaaacatccctatatttgttattccctgcattgaaggtagaaccgatggatcaaatatttctgtggtagtccaaagtgctatatggggatccattgctcctgcagtttggaattttatgctagctgccaggttatacggattgggcacaacttggactagttttcaccttttgtttgaaaaagagtctgctgaattattgaatattccatatgaaaaagttatgcaagtggccttacttcccgtagcatactataagggaaaatcctttaaacctgcaccaagagatccgatagaaaaaataatacacattaattcatggtaggtagttttaccatcatttattagaacatatcatagagattatcttattttttactgtctaagataaataacaaaaacccagggatctaatgaggacttttttcaaaccattccgataattttcagaggtatcaatactagttaaatattcatataattcttttattaacagtcgattcgtatcactctctactttaacctctatattttttacggttgtaattaatttagcaggcaatgatatgttctcctatttgtagtataaccgatgaaatatttgaagtcatgtgaagaacgggcccgaaggggttcgaatccatgagggacatgggaactgtaaatattaaaaggtatttacaaaggcattgggtgtctaatttgaattattactaatatcaagaatcaaagtttgtacatcttggcgatcggtggattagcaaatataaattcaaaattttattgatggttatatactaggagatcacaaaaaataaaaaaattcagtccgagtctccatcatcatcggatgatgagggtgctactgctggagctggaactattaccacctgcattccactggcgtttaccaattctttttgaatctgaactatattatcttgtgcagcaccaatatcatcattatttaaagctaagatagcagcatttgtgtaattaagtaatttttcgcccaattcgggatcttgttgctttgactgattggcttgtgcaggttgttgttgagcttgttgtgtggtattctgtccgcttgtctggttggcttgctctagctgttgctgtgtttgattagatacttgttgctgtgtttgattggcttgtgcaagttgttggttggcttgctctagctgttgttgagcttgttgtgtggtattctgtccgcttgtctggttggtctgattcgtttgacttattatttgaccatagatattagagcttccggcatttagtaatagtaccaaactaatggttattattagtgtaatactaacgttaatgaaagtcttcattgtagtatttgatcaaacaaagtttttatagttttagtgaaacatctttttggattagatttggatcctcaattatttttcttatttcatttattatgaacattgaaattgcggatgtatatgtagatcgggctggtcaattatgagacagtcatagaaatcatcatacacgagtcataagagaagtatttcttttaacacgatagattcaaattttctcagatcgtatttgcgggattgaggtttagctattgataaagttttcctccaatctcttctatatttaattctctttcaaacaattgactcaatattgattgtatgataattctcaaatcaagtcgtttttttaattaaggcctcaggtgaaagattgttttctattagaatgcttttcaatctctcaaggttctgaatttcaaagctagttttgaatgttctgtccctattccaaaactatcagttgacgtgttctcaaatccatagaatctttctgcagcaagaagactaggcctatatcttatttttatagtgaaaaataaccatagaacaattctataaataggtttcatttcttagaactgaagatacattttttattagttaaacaagattatatgttaactgaatttcttttaagcgattttattttttctaataattccttaacttagcattagtccaaagggcttcaaaaatggaataataagacaatacattacattacatttgctatagaataatttgcaataccatttttatatccttatattatcaaataagatcgtgatagttgaaggaataatatgtttggttataggaatagtactttattttattactccgttgtttcactccccgtcaataagtcgtattctgcaattttgactgtagaaatttcgacaatattagtactaaatggactattcacttaatattatttctttaaattactatcggactgcactgagccatcaggattgggaataaacttatcaaagttaggtatcttgtgatattcttcatttaatctctcagcattagagaggtaattatctttaatgaggtccaactggttgagcattgatttttttgattcctcgtttagagttaaaaaatcagattccatcttttcaatattttttactatctcgctatttccaaacatgctataataggttttcataatagaagcattcgttttgataatttgtatttgctgatgatatgcggtttcaatcatgtttttgaattgagtataatttaattcgatcgtttgtatatgctgacgatatgcattttcatatatgtctttgaattggctataatttgattcaattgtctgtttttgctgacgatatgcattttcatatatgtctttgaatttttcatttgcagtcataatacagtctaattttttacttaagaatagttatataaatattgttcttgttatttattagttagcctctgttcactcaagcatttacaattcaagattatgagagtcacaaacagatcaaaccagttacatcatctaaagaaaatgttgattcacagttggccaccattgttgtacgattaaggtatagtgagtccattgccggcgtcaacgattgtaaactgagtgattattactaatgaaaatactataaggatattttcagtctctttactgataatttttacagacatcttatcttattcattcaatattcccgaataacatattgaacctttcaatatcattatcctctatacttttgctcgattggacatcagaattattaaagaacacttcattgtagcatatcgttacctcattttatggtggtctgttattaatctggcaaaagttttaaaatctatatttatagggtttgggcaatgcttcttctaggttatgttattataatacttgtaattgttcttcttttccctaccagtctattctattaatggtgaaatcgtttttaatgttttttctgcaatagtattcattgttgcaggacctgccttgggatatccccaactattgtcattgttgctaaacgtgtaacgattctgaatagcacattaatatttgttgcttaattgacatgtagtattaattctaattcggtgttatctaccttcaatttaatataattcaaatcacaaatgcttacagtgggattcttacatgctcaagagtaattgtgtttccataaactgaaaccctgctgacagtaatccatgttgtttgaggctatctatttgccaaacttaataaaaagtataatcctcaaatcacttgcatctgagtgattgtttgagatatttgtatttgtacggactgagcagtctggacttggtcttaatttatctatgactatagggcttatcgtctttccatacgttgatattgctttttttgcatatgatgtcctacaacaacggctccagcgactgaagttcctcctgcgatcattccaccaacgacaagtcttcttcctaccataatttggatataccgtggattattatataaattttacctagctatgggtatgaagtgtgtatgcatctttgtctgtcgctaaagaaatacttactgctgaatgcgatacctcacaaaataccccaaacatgttcttatcgggctgttgaatttgctgacaacagagaatagttgtacttagttgctttaatcatcgattataaacgaccgaatttctgtaggacaaccacattatatagttgcatcaattctatcttcaccgataagttaaattaaaacttcccacaaatattcatatgtcttctacagaacacaaacggattgttcacgaattcattgatgaaacttacaataaagggaattttaaaaatacagatagatacgtaacttctgatttcatataccatgctcgtggtgtgagcattgaagggatcgaagcctataatgaatgggtttcctcagatcgtagcatatttcctaatattcatgttacaatcgtagatagcatagaagagtcagagtcaggtagagttgcttcagcttttatcgtagaaggtactcaaggaaaggaaattcctggcatcccaactaccaataaggattttgaaacagtaggaatgaacatgttccattttcaagataacaagataaaagagggatgggttgtagttgatgcgcttactgcagcaatacagcttggtgcgatcaacttaccatcttctgaggccgactagaaattatctgtctatcccaaatgctatattttatgaattagcaaaggtctaaatgaagtagtatctgctcttaataagattagcacctacagtgcattatagataatttttggttttgaatttatcaataaattgttatatttaccatatttaccatattgaatggccaaacctaataatatctcaaattaaaactctgcaaaaaacattttaggctccattatcgaatcaggtttagcgttactatactatattgctggttattatgttgtacataaagaaatgttatgtagtgctttagagaaattcaatgaaaattcatttgcactagttcagtgtggatattcattagtaaataaaaagattgtcagaaaagaaccaaaacaagaatttgacatagtagaagcgaagaattttggagatgtaattcacccaattgataaaaaagaccaatctgctgataaggattttcagtattttaaatatagaattaaatttgatgcagtgctcggactagcgtatataggttataaaaaaggactgggtaaaaatgcagacaaaagatgaggaaactaaagatatacttgataattatttatcaagagatacagatgaaaaagaggatcattgtgctacagactatctaaaatctattttgtatgtgaataagatacgaaacataattgataataaagttagtgatcgtaacaaaagtattgatgaattatttaagttagtttttgacacatttgacaacgcaaaagttcaggttaaagatgaattaaaagatattgttgctcgtgcacataataactttggaatatattatttaaatgaaggactttatgatgaggcagaagtacaattcaaaaagggagtttgtaattattcattaaacgaaacagttgcaatgagtttgttcatagtctgtctatgttctttgtaaaagtgatcctttaagtttagatattgtaataagtataaagaatcttttccctctttaatcaatgctattttgctgaacatattttgatcaatattaaagatgacacctacgacagcttccctacctccaactatcgatggttggaattgttctatgattacagtctcaggcctttcaggaaacatcttaattgttaggtccactagagaggttcctgatagtgttgggggaaaaggtagtgcagatattgtaattcgtccttcactagaattaggaccaaggaaaccaaccgtatcgtgctgagaataatctggttcccaattagagccgacatagagacaatggaggcaagcagatactcaaacgactacgtagtatactttagaaagggaacaagaatagactacgaacatcttagaaatatcgatttatggggataccaaataattaacattcaattagatgaacaaggcagaattagaatgaccctccgaaaggtaaggacagccttaacctaactatttttttagcaaaaaaataatgaatctttaaagctcagggatttgtaaaatggttactaaaatgtttatgacagatttaatattaggatctaccctcagcgtttacactgctacagtattcgggtttgtcgttatctttaaaggatgttttaaacaatgagtatgtctgctactactactacaaacactgcaaccaagaaggggtagacccaggaacaatcctaatacgactcaaataggtgcaacttatgaatctgtttatcaatgtctcaagagactcaataatctaactttacctcaatctatgaatcgcatcagcacaaacgcaaacgtcaatatatttctagtcaagcataaactcatcaaagaagtaaatgcagatcataatttaagagctgaatatttaacttatagatattattctatagatacaaaaggccaggattatctcaaaggatacgaatgtttcaaggagctgataactaactaaaatgtcctgtaacggcctatgctctaaagaaaaacatatcaattctgctacttttcttaatcttgattctaaatgctcaggctgtgaggtagcatataacacagactctattttttgctactgctgcaaatgtagacttagaaaacgaaaatctagatcaaaaaggtccatgaaatctagattaatgatgtcagaggtaaagaggtattaacatggttttagaatttatcagatctgaaactcatccatctaccattttcattattaatgctaattctcttcaggataaaatagaccttggagccttgctatctcgctattctagaagtcacaaagatgctgaaactttatacaaagaggaatttcttaccaacccaaatagaggagctgaattctatgctaaagtatttggccaatatggcgatgattctatttctgaattagtgcctcatggatttgcattatgtttagagaacattcctatattatggtctacctatctactccattatagaactctatcagttattgagaaatcaactagatatgtaaaggtatttgattattacaaacctgattctaaatataatgctcctaatctatatgatgcattatgcaaaaaaagaatagatgaatacaacaaagcacacgataaagcatatagaaaattatctttaaaaattgacacaaatgatttagaaaagcctgaagtaaagagagcattaaatgccagggctttagatgaaactagggacttgttacctttgtctacttttacatctttgggaataatggctaatcttcgttcctggcttaacatccttaccaaagaaaaagtaagaaatgatccgagtgtatatacagcagaattaatagatccacttacagaattattcaaaaaatattttcctaccattttcagccaagataaaataaactatcttaaagaggctgaaacagtagcattcgattcaaaactacaattagaaatatcatttaaagaagatcctgcaaatccaaatgatacagatgaatttacattaaaaagcgagatagacgatgatacaagattagactatctttcttatgcttatgaaacaaagagaatgaaaaagacaaaaccactaagggagactgaaatgctagactttactatcgctatccctgatttagatatagcagcatttagagatatacaaagacacagatatttcacaatacaaatcaataaatgggaaaattatcaatcaacagatgaagaatttattttattatcctctcctctctctacaactatagatataactattaagggaaatctaagacaatggactcatgctatagaattaagaactcaagagcaaggtcatccaaattatagaagaatatttcaaagctgtggtatagtaatcgctaaacaattagacatagacaaagaagaattatttccttatgcagattggcgtagtgatgaagaaattaacgggttaggcagtctcgaatcagaagaaaagaagcagaataatggtataggagattctaatctaacatgagttcagacttttatgatgctaattcacctatcggagacacgatattagaggataaatcccctgcagatattgacgaagatatagcttaatgtgattcatgttctatcatcatattagttccctatcaagagaacaactaatctgcactcgatgcgggaataaatatgatccacattacgaattagtccaggtccaagataaagaaacaacattagatgaattatcatcacaaggagaattaggatataaggatgaaagtaagaaacccatatcaaaaactctaaatcataaagaagcaagactagaaattatagaatatgtaaagaaagaatttgaaagatgcagacaaatagaaatcattgataaagacgtaattactaataaaatatcagaggccaaaggtaaacaacaatgaataatgaaagactgagagaattgttaaactctcttaatgatatacatgaatccctaataaatatacgaaatgagagacagcgagaagtggataaaatagagagagaaagaattaagatatatcatattatgaaagacttgtcagatgagatagacaagaatgactaattcctacattatattccattaattttacattaatacccttgtaattctaaagtcttttaatagataattactttaagtgtatatggttcaaatagattttacagaagatgacataaagaatctaaaaacactattacaattctctaaagatgcatgtcctgttgagagtctagaggggaatatggataatgactatcttgataccctaattgagaagttagaaaaggcaaaataaataactattattcatcatctgttcttattttatgaggatattatcgggccatgaaagtaacaaaggaaatgaaagaaaaaatcaacaataatggttttgttgtagattacatttattgtagtgaatgttctaatttcacatctctcaaggactatgaaataggagacgatgtaacctgtcagtattgcaaaaaagataagaatattgtagaataataaacaatatgaaggacacaaaagaaatcaaggagggaataggttacagaggtaagagcttaaaaaatatctagaagttgtaataaaggaagtaataaagaagaaaaattccctgactcctgattttgttactaatctaacatttccatttgaggcctgagacttgcatttttattaataaagggggtaaataataattatcaatagatagatactataatcaagtaaagtgtttcttgttgaatctttcttgagatcttatcaggggtaaagtatgattgatccgaaaaactaaatatcaatttcttagactttcgataattagctttttatttagtgaaaatagttttggataactgtaagaactggtaggagttaaatttgtctttagatagtttgataacaacaagtgagctattactttcatattttttctctcatctttatttattttcctaccagcaaatagatcgataccaatactctaccaaacagcattcttgttattcacaagatttaatgtcgtaatttcaatagaacgatcaggaacacctatatttaaaactggtagcaataaatcgtccttagatctgaatttatatcttgacctttctttcattactcttatccatggatgtactggattctcagctatttgttcttcaatttgtttgtctgtttttctttttgaatccaagaaacctaatatttgctctttctcttgaatctgataaaacggtgtgttttctcctatatgttctgcatatcttatcaaaacctttagtaaaccatttagataattttccgaggtattgcgttctgcaatattcgtaaaaatctctaattacttgtctgttgatctgatttgttactttgatttctatattttgaatggttgttgataatttagcgggcaataatataccccattctcttacctaatctcctatacaaccaagaattgttggaacccatatggttaacgggcccgaagggcttctaatccatcaaggatatgggatctgttaattctatatatttcatgcagataatttatgatattagaaaatagatagatgaatagataatcttgaccatgagtgtatgcagctccttcttattttataatgaaaaataactatagaacaattctataaataatttgcatttcttactattgggaatacattgttttattaagtaaagtcaagataacatattaattatagttgtttcaaactattttattttctcctaatatttaagtacaaattgctcaagttaattacagaaatagaacgaatgacctttgatttcaaatagattaattcatgaacgatcatataatcgataattttgacgagagtaagcatctattggtatccaagtttcgcagagaaattgtaatcgatcagaaataaaaaaacagattcaaaaataccattatttctggtttatgtaaaacagaataaaatgcctccggggtttccaatggtcatgtattatcaagaatattagaataatctaggttagctaaattaacgcctgcatttttatgttcggtcatacatacaccaataactcgactatttctcaatctgatttctcgcatactgattgatttcgtctttagcatcatcatatcctctctcaagtaatagtttaattgttccagcagagaaatcaaaagttttatttgaaatagtatattcatcattcttgcggtctatgcgtaatatatcatctatttctggtcgtccttcaagtaagtctgaatatttgcgaatcttaaagaacataccgtgggatcgcgtattctggttcaagatatcgttaataatttcgtcttttagtccattctcctttgccgcttttattaatttacttatcaaggtaatataatctgaaattgctaacatcgcaagttcttctgtcttcgtccgatcagagaaggttatgtcagtattcctgttaataaccccgtcccgatcagtaggaatctctgcctgtttcgtgggatgtagattgataatacatatccctagtgctggtatcttgttccttaatcctcttactttccaccaatagagcctgtgtaggagaactagttgcactaatggagtattggtcataagtccgccgtcccaaaaatgtcgcatctcttttctgtagccgatcccatcgctgttatttgtcggcccgctaagagaatcaacttctattttagtaaaatcaaaattgactggaaaggatccacttgccataacatgatctgatgtaatacccttatcatagtgaacaacatgttcaaatccgaattccttgccgttctgatttattaatcttccatactctgtttttcgcgaaccatcttctgttggatagctgtcaaatgtgactggtataccatcagcaacgtcaactgctactagtatgagccttggctgatcttcttcttgattggtagcaattggaaattttacaaatcgctccaaacttcttcgtaaaggttcattattatagcggtaccatgtattattagaatcaaaaaacctgctgtcgtatgcaggcaaatgaggataaaagacatttggtattccgtatatcgcaaattcttgggctgaatagtatcttcttgcagcttctccagacgcaatctttccattaattgcatgccaataatcccaccaaggtttaaaaaatggattagatccaactaatgattccttagaaaggtaattccagaaatcgataagtctctctgctgatccctcataagtctgattttctacgacataacttacgagaacagcagagttgatagcaccaattgaagttcctgcaacgatattaaatataggccatccctttttaccttcatctgtatcccttttagagaagaattcatacattgccttgtacgctccagcttcataagcaccaagagaccctcccccttgaagtactaaggctctctccctatctggaacacccgtttgcttctcaatactagacattgttataatagcaaactcgtaaaagataaaggattttatgataaaaagagacacggtctcttctgatttattgtacaacctaacctggacggggtggacacctgagatgagtctgaattgttactaactaagagctcgtcctaaaaactctataacactttcaaacttgcatggcattcctctcgtgtgttttgaccaatctgactgcaaaggccttagatgaaaagcttcgaagatttaatgaaaacatcgttataggtcttcattccaatcaggctttgcttgatatgtttgatgactaggagacgacgcttagggaagatatgtccaaaatcttcattatggctgcagatcgatttctaatgctaccatgttcctgttcatgtatcgaaggattacaatgtggagcaacaaggtctaaaagagcggatggccgcagtaaacggattatttcgaagaaatcagaaaaggagaaaaaatcttgcggcaattatacctcactttcgtcataatgatcaccaaatcaattaatcttcctacatagaaatcaagcattcattttgattattttaatcttaatttatttcgaaattaaaaaggaaagtgaaatgtaatatcagttgtatttgagcctccctactcagttggactcgtcattgatctaataatcagaaaaccaagattaataaacatactcacgcattcaatcatcgattcaccgcaatgttgccatcatttttttgtcactcttgactcttactgaaagtgagaatattcatatacatggactacttttcactcgtactggatttttccttggcactcatttcgatttcttttgagagagaccagcttagtaatattcttaaaaccacaatcaatgcgaaaactgcggtttcctctagagttggatccaacaaagacttaagtaaatcagcggcgatcaagaaatctagtgcaataagaaggcctctcaacattctagtgactaattggcggacatatacctgtcgctgctctttccgtattttagagagtaacaacttgatcaaataaaataaccctattattacaatcgcaactacaaatattccaactattacctctataattatgataaggtattcaacaatcaggtgaaagatttctggactttctaccaagctctaaattacctttataatcttaatgcttatatctatgtcggattcagttttttggcatcataaattccaaccggatctttttttatcaaacaagtcatattgtatgaaacttttttatttactaaactttgaaccatctaattatttttagattcagaataggaataacaaataacccagctgatatttttcctatctagtatttctgtaggttattaactttaattagctaaattagtattttatcgttagcattgaactcaatttcattgataatgctgtcatgtgaatattcaattcccgtctgatttttaaccaaatctaaatatttagtgatacatgaccgaaccattttgttattttctattaaattgaacgattctggtgcaacatctccatgtactatcgaactacgtatagcataaaattcctgaactcgtttatgcatcgatttacgattctgttggtcttgggttaacaatcttgaactcctcaaactcaacctatgcgttaccgaatccttgggatcttttttctttgaaaagaatgcttccatagcaattgcaagatctatgatagtatcatctgcatcaattctttgataactgtaattgaatctgcgaaaagaagttctaatattagtaaaaggatcgtcgagattttgtctttgttctattagttccaaggtttcgggataatttctatagaattcgataaattcagcaagtttttgagaattaaataggtattgtgattgactataagattcgaaacccagtatctttaatcctgttgtacctgatgaataatcgagaaattctgaagaaaaataattaacggtagaatctattccgaacccgccctcttggaataatctaaatgatgtaattaatgacgtaaataagctcaacgtactttgactatctatatcgtctactcgttgattattagacaataaatccatccatctcataatttcttttaaattcaataatccaatttgtatcaatgaaatatttgaacccgtgtgattaacgggcccgaagggcttcgatccctcgacttccggctttcttcataattagagaatcagatagaaggcaggcgctctatccatgctgagctacggacccttaaaaaactgtgattggtacttccctataaaattgttgggctctaaatcgactccattaatttgacgtatctacttctaagcaatgatgacttagaaacagattcatccgatctgttaaagtctttgccaatcatgaaaggaatttgttgtcctttcatctagacttatgatgttaatttggacaaaaaatattttggttatcattttggatcataatgatgattatcacctgcctcattcataatgtagcttatggctgactctgtactctaaaaaaatggaaatggactgggcagctaaaagataaatcgtaatacatattcaccaacctagcaagttaaatgttcaatagtccccgaatatttgcaaccctaattgttatatttgatttataatcgtaagatcaacggtgtgtttacggtgtttacggtgtttacggtgtttacggtgtgtcagacaacaggtctagtcaaaaaggagatacaagagtttttaggtttagatttcaatccatcaagaacatctaacgtagttatcgagaagatgattccagggctattctagatgaaggtgcaatagtcgacccaatttgaatactatgcaattacagatagaatttcttctagataattttgatgttagacatgaaagaaagtaattaggtctgatatgtgcaataccaaaaccggagagcaccgatatacaatgccggattttgaaattaatgacacagacaaaaagaggtaagtatgtgtatgttatcatgatatcagattttttagtcagacaaggacgatgaaatatgtatattaggcaccaatagatcaaaatatccaaaccataggacaatgggctgcacagaaccttacctttaagtggtttatgaatatattccaagtatagtgcttaccagttaattttgttctattgatataaaagcgacacaacgggttacaagtactgtcataattacccaattatatctgtatatgcgtatctgcttatataacattggttcatcgccgtgtcatagaaatactagtgctatatgattttttagcaatgaaaggtgggcattaagaaccaaatatagttttaaaaatgattgtataatttatgagaaaggggacaggaggtcgaaaacagtttttctatagcgcaagcctttctctaagtaatcaaatattgctataaaacccgagatgtatcttaaatcgtcgcaatctcattgattgaagttcccacggtattgatgttttatcgacacacgagacaacaagagaaattaataacccgcaattgctgtcttgaaacacacataggaaatcagattgattaatcgccattaaaattaatgattcaccacaatttagataccctctcaataatatacttatgatatgaagatacctctaaataaacttcagatgttttaatctgcctttcaatagtgcattttctatctttctaaagtgcttataataaagttaatatccgcaatagacatacaaattgatatcaactgcaaagcaactcttaataattacggaaaagatgttaacaaaaatggggtgagtggaatcattgaaagataacgaaaaagtccaaaataatgagaataatgatacagctaaactacccttcgttaatgaaaaattcgtagatctttttgaaaatttcttcaaacagttgacagaattgaataagatttcgacagttggtccatttatttccatgataaatgatcctcagattaatatgaataacatgagggaatatggaaatgttttgattaactatcaaagatatctcaataaatacttgacccaaatgattaattcgtaccttctggccttggacaaagtttctgcaggaatagatggtaaaaatgcccatgaaactcgcatgctaattattaattcattcgaagatgtattctctagtatgtttgagtcgacagatttttcaatcaattataacaatctaattaatatatatattgatttaaacgagagttatcaaaaactttatgatgcctcgcttcctatgttgaaaagacaatcgctgagcaaagaagaaagagatttattgttcaaggagctatacgaaataaagaagattactttagaaatcaagaacaagatgaaagagagaaaaaatgaataaaactattttggatcactatttaagtgaatatgcgaattttgtaaatgaacctgataattttagaaaattaacagagatgaaaagattattatcaaatatagaaaaaattaaaacaggacaaaccgaatacgaggtcatcaaggagaccggtctttttcgattgttgcattataagtcaactaaagaacgtgtttacaaatatcctttgattatagtttatgctctaatcaacaagtcatacatcttagatttgcaaccaaacaaaagttggataaaaaatattctagatcaaggcataaacgtataccttgttgactggaagtcacctggcaaatttgataaatttacaactattgatgattacgtcaatctttttatttatgattgcgtggagattgtaaaaagcattgagaacatagacaaggtttcacttcagggctattgtatgggtgctacaatgtcgttaatttatacgtcattgtatcagaaaaatgtgaagaatttgataactgtggctccagtagtagataccgagaaggataagacggtcataaaaaatatggctcagaatatggatattgacaaggttttgtcacattatgaaaatttcccttatgagttattatatagtctatatggatctttaaaaccattcaaacagggagtaaacaagtacttgaatctgtttgataatcttaaagatgaaagttttgttcaaaatttcttgagagttgaaaagtggttgtatgatacacctccaatagcaggagaaacatttaggcagtggattaaagatatttatcagaagaaccttttttcaaaaaacaaattggttgtgggtgaaaatcggataaatctagcaaacatcaaagtccctttattaaatgtagtagcggaccaagaccatctagtatctccggaatgtagtgtttctttgaataatcttgtatcaagtacggataagaatttgatgaggttttcgacaggccacgtaggattgattgctagtgggtattctcaaaacgtggtgttgcccaagttgggcaattggataaagattcattgaatctattctagtttttttgcgaagtctttggtttgcgagccaaaggtatgataataacttgcacgagatcaccctcttcaattcctagtgcctgtcgctctgcctctgggattgatatcctaccaccactttggacatttgttttaaacatcgcattataattagtaaaaccttgaagcgaggagaacatattttggaaagcattatattgaaaatttgaaaattgtcttaccatgtcttgctgaaattctgcggtcttttcgattgtcttttttaagtcagtattcttatcgccattttcattttcattactcatagaaaattaaatatctcatcaatattttaatgttgtaaaggttttataaaattaaatcaagagtctataaatttttcaataatttcataaaattcaactggcttttcaacatacggagtatgaccgcagtcttccattatcaatgtcttgacatttggcatttgcttaaaatattctatattttctactggtatggtcgtgtcatttcttccccagataaccaacgtgggtacaactatttccaccaatctttttcgtaaagtttgatctttgcgcattgcaagtagagtagaaatgagcgaatacttggcattagggagtttcattctattcatatagtccttaactgttccaacatcgacgacatattctcggctattggccatcatttcaaacgccctatgaacattttcagatgttggatataagccagagaaaatatactgactcaaaacatatgttggtttttctaatgttccggcaggagaaactaaaatgattttctcaaagaaatccctatgagttaaactgaattccaatgccaactgacctccaaatgaggagccaattattactggcttttgaatctgcattttctcaaagaaaacctctaagaatttaataaaaaattcaatcgtatattctatgaggggtttttcactatatccgaatcctacgagatcaggaactactacgttgtatttttttaataaaggccataaatcagcccatctttctgcagatgcacctaacccgtgcagcaagacgatggttttctttgattctggatgatcaaacttaataaatcttattttgtaacctagtatctcaataaaatccatactttgattactctttttgtgttgattaaataccaggctcaattgttgaatattgttttataattgatatgttttatatatataatttttaaaaaaaccattaatttttataaggagaatacaggatgagactccatcaaattattttctgtataattttagaaattctaactgataactattctttacgcatgaaatagaaatgtagttcatattttttgtgtattgtgagtgagtgcaattaagaaagataatgtattttacatacatacttttgcttgcttgcttgtttttgtatttgttttttatagttacttgtcggttgtaattttttaattacaaatcaggtgcgttgggctattggtgatggcaggctgaatatctcgcccgaaggcttgataattacacctccattccatcaacgccatcttctatggccgccctcctccttacggaaggttgtcttttctcgggaaaggcttcctccttagatgctttcaggagttatcctaaacagcttagctgctcagcttgccctgtcggacaactgataaaccagaggctgcgctgccctgttcctctcgtactaggggcaacttcccctcagacaaccacgcccctgtcaggcagagaccgacctgtctcacgacggtctaaacccagctcacgttcccctttaatgggcgagcagccccacccttggctcctgctgcagaaccaggatgggaagagccgacatcgaggtaccaaaccgcggggtcgatgggagctctcgcccgcgacgagcctgttatccctagggtaacttttctgtcaccaccagcccccaatagtgaggacatgatggatcgctaagcccggctttcgcctctgaatcccgtatcattgggaatccagtcagactggcttttggctttgccctcaccggcggagttctgtcccgcctgagccaatctttgggccccctcgatacattttcaagggggtgccgccccagccgaactgcccacctgccgatgtccctgttaaacaggttagcgatacggtaacaaatggctggtgttacacttttgcctagatcagtcccggagaactgaccataacggctcccagctactctctgcatttgacaccatatcgcaacaacaggctgcagtaaagctccacagggtcttctctccccgacagaggttcggggactgttcgtccccgttatgtggcttcaccgggttgtaggcagggacagcggggccctcgttgttccattcatgcacgtcggaacttacccgacaaggcatttggctaccttaagagagtcagagttactcccggcgtttagcggcccttagcccagttgaacccaggttttaggtaccgccactggccaggatacagaggccatacacatcctttcggactagcgaccacctgtgtttttattaaacagtcgggaccccctagtcactgcgacctgcagtccctactcctcgtaaaaactgcaggcactccttataccataggtacggagctgattttgccgagttcccttgccatacggtatacccgatagaccttagacttctcatccagggcaccagtgtcggatctcggtacggtcttgaaagtatcttcctatttctgctttcattgtctcctggaatcaagtaaaccctccttgcagaaggccattggtatctcgctttaattctcgccattacggcactcctcaaagctagaatacttagacagaacgacggttctgcttaccctatccggaagcgacagaagaggtgaataacgaactttcaaggcactggaatattaaccagtttcccattcaaacaattctgttgaggttgtttttaggaccggctaactcccggctgatgacgcattgccgggaaacccttgcccatgcggtcgccgagattctcactcggctatgctgttactaccaccaggatctgcactagtagttcggtccactggactttacagcccagcttctacccaaacactacgcccacctaccacgcaccgacatcgtcggtggtctaaagtatcggtagtctacttgagccccgtacattttcggggctttcgagctcggcaggtgagctgttacgcactctttgaaggatggctgcttctgagcctaccttcctgctgtctttgctcgaaaacaccctttggtttgacacttagtagacatttggggaccttaactttagtctgggttgtccccctctcggttatgaggcttaccccacataaacccgcctcctagcttctacgacgcttgcacattcggagttcgaatggatggcgagctctttcgagcccttaccgcccgatcggtgctctacagtacaagcaatctcagctaaggcaggactgcgatccacttcggtgggaactagcgatcaccggactagattggtttttgacccctaatcccagatcaggggaccgatttgcacgtcaggacccttgcagacctccagcgagctttcgctcaccttcgtcttatccaggactagatcgtccggtttctagccttactgccatgactcaagaccctttcagatccattgcctcttttttcaaatgaaaaaatgcgcaaattcggtttcccttcgccttccctctgttaaaggttaagcttgccatgacagcaatctccctggcccgtgtttctagacggaacgtatgactctagaaatcctttcgagccatacacgtctgtaaccgattggtttcaggcgcttttaaccccccttccggggtacttttcaactttccctcacgggtactagtattctatcggtcttgatgaatatttagccttggatgctactttcacccatcttcactggccactgccaaggccagttactctgaatatgacagaatcctgctctcattcgcctacgggggtatcaccctctattccggtattttccagtacactttggcttcgattacaggatcctatacgtcatacccgtaacaccacatctctatcatgttaccataacagattcagtttgggctattccgctttcgctcgccgctactaacggaatctcaattgatttctcttcctcgtcctactcagatgcttcacttcggacggtttgctctccctcagctaaagcatgggagtgtatagagagacctcattcggaaatcccggggtcgtcggtcgcatgcacctaacccaggcttatcgcagcttgccacgtccttcatcgcttatcaagccgagtcatccaccaatcggcgtctttgcaccagtccagtagttataaattaattaataaattaattaattaattaattacttttttatttggagtttctttctttgtcctttggatcttttgtttgttattagttatctagttagttagttagttagttagttccacttgtggtagaaaagtctaattcaatttggttggtattggtatttcgtatgtatgtttatatattaaatctgtttgcactacaaccagttacacataatattttactacaattcactattccattattacgcgaatagttatcgttgttacttcttcgattatatgtaattgataatttgacggagttttcctttacatgatgatcattgtaaactcacatttactacatcaacttcattctttatcttctactcctcatttacgagacaaagaattgcatccgatactatgctgattttaattggaatgatcagatagatgatttatgattttgtttagaacccattataatatttacacagattacgccaatagaactctaacaaatatgaatattttttgtataaaaatacaacatactaatcagtttttcaaaccgtatgaaaaatgaaggaattgattgatcagttttgatttgattgcactcccttctttatctaccaccctactctactgctatactatcttataatcgtccattcgtaatggacaggacaggacaggacaggacaggacagataagtgtgtatagtaggattgattggttggttggttggtagatagatttagggattttattttattagtataattattgtaaagtctcgcagattagaaagagcacaaggccctttctaacccactaccactactacaatataatatctaaggaggtgatccggccgcaggttcccctacggccaccttgttacgacttctccctcgttgctgaccccaggttcgatagtaccaattaggcaccacctcgccaagaaccaacttcgatgaagcgacgggcggtgtgtgcaaggagcagggacgtattcaccgcgcgatagtgacacgcggttactagggattccatattcatgagggcgagtttcagccctcaatcataactgtggtaaggtttagagattgcctcctcctttcggaatcgaaactcattgtccttaccattgcagcccgcgtgtggcccgagggtttcggggcatactgacctgccgtagcccccaccttcctccgtctcagcgacggcggtccctctaattaactccactactcctgagaataatggtagcaactagaggcagggatctcgctcgttacctgacttaacaggacacctcacggcacgagctggcgacggccatgcacctcctctcagcttgtctggtaaagtcttcagcttgaccttcactctgctgtcgcccccggtaagatttccggcgttgactccaattgaaccgcaggcttcaccccttgtggtgctcccccgccaattcctttaagtttcagtcttgcgaccgtactccccaggcggcaaacttaacggcttccctgcggcactgagttagcaataagccaactcatcaccgagtctgcatcgtttacagctgggactacccgggtatctaatccggtttgctcccccagctttcatccctcaccgtcgagcgcgttctggcaagccgccttcgccactggtggtcttcaatggatcaacggattttacccctacccatcgagtaccgcttgcctctcccgcctcctagctctatagtatcttccgcagcccatctgttaagcaggtggatttaacggaagacttgtagaaccggctacggatgctttaggcccaataaacgtcccgaccactcggggtgctggtattaccgcggcggctgacaccagacttgcccaccccttattctgcaccatttttagaggtgccaaaagatctccttaacggaaatcactcagagtaaccctgtcaagctttcgcctattgcagaggtttcgcgcctgctgcgccccatagggcctgggcccttgtctcagtgcccatctccgggctcctcctctcagagcccgtaccggttacaggtttggtgggccattacctcaccaacagcctgatcggccgcagtccaatccaggggccatatagatttaagtcattacccattccagaagtgatgacctatcgcggtttatcctcagtttcccgaggttatccacgtcccctgggcatgttgactacgtgttactgagccgtatgccacatattgctatgttgactcgcatggcttagtcccactctgatagcagtcgggtccggcaggatcaaccggagtcaaataaagtaaataatggctgtagaattattatttactttattataaatcgtcggttgattctcacataaacaaactaactttttttaggggttgtttgtttattttatatataaatatcgtccatttctcctcttctgttatcttcttccccatctcaggaaagaatagatcgaaaaattgaaaggacgtttattgagtttctttctttattgttattctatttcagattaacaataaagagaaagagtacgatcgaaaaactagatttgtatgttgttttttttttacaaataataaaatcacacattagctagatttgttctataggatcatctttaatgcaattataatagcattatagtgatctatacttcgatatcatctatctgatcattcccatgtcagattcaatccatcaggtcagcactgatttttttgatcgaatctccaatacgttatgatgaatctatttagatgtattttaatgctcgatccttataggatcgacttcataccgaaatactcatgattctatgattactgtaaagagcgcacctggaggtctgtaaatcacattgtggcacttgccaacttcattaccgacgccgccttttgtcttggatgcgttcataagtgtttagttaaatgataatattaactttagggttgcaagatttatcaaaaagatttttccatgtacaattcaatcccaatcacacttactgcatcaaaatcagtaccttgacatctatacacgagctaaatatagcagccatgattgtgtacaagaaccaccatgtagagttaatcatgtcttcatttggtaaaactcaaaaaaaatatctaccaaattaaactagtttcattataattgaaatttagaatatgactaaggaatcgggataaaaaagctggattccttgggaagtatgatttaacctctttagatatctgagaatatcttattactcgaaactattttatcccaatcatcatatggaattccaaagtcttcaaaatgttatcatgtcaaatttaatatgctaaattgatatccaacaaattaatttttaaaaggcagaataaaataaacaatagtgcagcaagcaaatttggcatcagataagaaagatgaatatttttcaaagaaactacccgaagatataccgtccttgcttctttcatccttctatgtaggggaaaaaaaatctgttttcttaaagttttataatcctgctgactcacaaatttatttttggagcgagtattttataggcaatactagttcaaagaagcatcaaccttactgttttgttaaaaaaaaatttgaagttgaagcaaagagtgttgtaaatcaagaatcatccaaatttcgaattcaagtagtgaaaaaagtagatgatattgtagatgaagaaatagaggtactcaaaattttggcacccgaccctctctcaatcgggggtacagataatagttttagggagagagttacttcttgggaagcagatataaagtatcatgaaagctatctctatgatttaggattaattccgggggctttttataaaagaatcggcaatgacttgatatttcacgaattcccaatgccaaaaaaggtagatcaatatttagagagcttgtttacctctaacaaattccagaacaatttcagtagcaatgagtatgacaagtttttgctgaaatggtcacgtttactgaatcaacccatacctgatattaagagaattgccatagacatagaagttgattctgaggagggaagaatgccaactgcacgagaccatgatcgcctaataacggcaatcggcttgtctgcatctgatgggttcaaaaaagtttatgttctaaaaagggaggaaaatatagatccaaaaacattagaccccgacatagtactttgtaactctgaaaaagagatgcttttgttagcttttgatgtattaagtaaatatccggttgtgttaacatacaatggcgatgattttgatatgccttatttatatgcaaggtctcaagaccctgcgattgatcctgcagataggaagccaattgataaagaacaggtgcccattctggtaaaaagagaatcatttatgaaaagaggaatacaagcagatccagtcacgatcaagtcaggaattcatattgatctttttaggacatttcagaataaatccgtgcaaaactacgcctttagtcataaatattcagaattcactttgagagccatatgtgaggcactgttagaggatacaaaaatcgaatttgagggaagtattagcgatctttccttagaaaaacttgcagaatattgtcttaaagatgctgaactaactttcagattgagcgcctttaacgataatttgctcatgaaactaataataattatttctagaatctctagaatgtctattgaagatattacaagatttggggtgaatcaatggattcggtcattaatgttttttgaacatcgacaacagaacatacttataccaagaagagatgagttacttcaaaaaggatcttcatcaaccactgcaataattaaagagaaaaaatatcgaggtggattagtcgttgaacccgaacttggaattcactttaacgtagttgtggtggattttgcaagtttgtatcctagcattattaaggtacacaatttgtcttatgaaacagtaaattgtcctcacaacacgtgcaaagatgacccgcttaatcatatcgagggaacaacccattggatatgtaggaagaaaagggggatgacttcaattctaattggtactttgcgtgatttacgggtaaattactataaacatctatccaaagatgccagtcttggtaaagatgataaacaactttatggtgttgtgagccaagcaattaaagtaattttaaatgccacatatggagtcatgggagcagagatatttccactctattgcctgcctgtcgcagaagctactgccgccattgggagaactactacgaccagaacgataaacaaatgcaatgagaatcatatcaaggtaatatatggagataccgactcgttatttttgaaaaatcctaatactgatagcctgaatacgatttctaattgggccaaatctgaactgggagttgatttggaaatagacaagcgttatcggtatgttgtatttagtgatctaaagaaaaattatttgggtgtacttgaagacgggactgtcgatgtcaaggggttaactggaaaaaaatctcataccccaccgtttattagaaacgcattttatgagatactgaatgtgttaaaagatatctttacggagaaggactttaccaatgctaaaactagaataaaaaaaatagttcattctcttgcagaagacctagagaagaaaagtattcctttatctgatttaagttttaatgtaatgataaataagtctccagaaaaatacgggatcaaatttcaagaaaatagaaatcatcgcgccatttctttagatggtaaagataagaatatagaaagcataaaggggatccctcagcatataaaggccgcaaaacaacttgttgaattaggacgacaactcaaagctggcgatattatttcctatgttaaaacaaggactattgaaggagtaaaacccgttgaattagctaacaaaatggatatagatactgagaaataccttgatacaatggaatctaccttcgatcaaatcttatcatcactaaatttgaattttaaatctataattggaaagcctagacaatccaatcttgatgagttgttttggacttgaatatgtttcaaaataattcttataacatattatttgaataaacatgaataaaatctcttatttagaaaacttctttattcctccagagaaaacagtcgcagggcacacattttgtgatattcctatccctattacatttgatgcttcgaaaatatgtatagtaggaatcccaatagatataacaactacatttggaaaaacagcatcttttggccctgaagcaattcgaaccacttccgcaaaacaaatcgaaacacttgtttttgaggaggacgttgagatttatgagaaggcattgatttatgatattggtgatgtcaattttgggaaacttaaggacggtaagattagcgatattaaggaaattagtaaattttgggtagagtttgacggcaagttgtcttcagtgttaagaatcatagtggattcaaacaaaatacctgttatcctaggtggtgaacatacaattacatatactatttataaggaactatctgaaacacatccactattaatccattttgatgctcatcgtgacatgaaatcgatttaccaaggtatgtcgatgtgtcatacaactccattttatcatctgattagggaaggttatcttagagggaacgatttggtccaaatcggcataaggcaaggagatagggaagagaataaattcgcaattgacagtggcgttattacttttgacgcatgggattgcaacagttctctggagaaggtcgtacagtggttaaaaacaaacacctacaaacgagacatttacatttcatttgatatcgatgtgtacgatatatgttatttaccttgcactggaacaccagaaccattcggattaaatccctttcaaatatcagagcttgtcaatagcataagcgatacagcaagattagttggagtcgattttgttgaaactggtttaaagaacaatgattatagagaaggggcgttggcaacccaaactctactaaggattttgtctagaccatacatgtccaatctttgaatactgtataaccacgagaacaaatttcctaagaagcaatttttggtctctttgagaggaattcaggcaaattgatgggaaggtcgggcttacctttcattggttctttaattatatctatcaattcatctatgtttgtagaataactcaatttttttaacctatcccggattgaaattgaattagtggcaacttctttctcaccgattattatagtataatgaatccattcagtttccgcatctctaatctttttggatagagtatcctccctatcgtctatatccgcgcgaatagaattaattttcagttgctttagtagttcaacacatttagggataaaatcgtctctcacgggaattaatctcacttgggtattcattagccatattggtaaatatggtgtttttccttctttcatcatcttggcagatttttcgagcaatgcaaaaatgacccgctcaatagctccgctaggtgaattatgcaaaattatgggatttttcttattgcctgactcatctatgaaggtaatgccgtatcgttccccattttcaatatcaatttgatctgtagctagagcagacgctttgccagagttatctagaaaattgaactcccattttaatacaaaataaaagaatctatcgtcccacatctccacgagaactggcttaccaatcttcgttactaaactttgaacaaactctttgttattagtataaaattcattggtaaatcttatggccatctctaaatctttttcaatagagattccaatttcttccatcacagaaatagataaatcaagtcgtttcaaaaattcaattttggcctgatcaatatctttacaaaatgcatgacaatcaggcatactaaatgcacgcaaccgccttaatccaaccagttctccactcttttcccttctgaaactatatctggttagttcgtatagtttaagtggcaaattcttatatgatatctgaaagtctttagtcattaggaattggccaaaacaggcggcaaatctcaaaaacaaatctttctgatctgatttaatattgtactgtcttgcgggaaagcgattgaagtaactctccatcgatggatggtgggaatcatacattattggtgtttctacttctaatccaccatattgagagacttttttggtcacgaactgttctagtaacgattttagcaatcggccttttggataaaatctcatgttcccagaatcagaggccggctcataatcggctatacccaattttcgcatcaacttaacgtgagggggttgatcttccactgttctttttcgaaatatttcatatttgaacaaattctctagattgatttcggattttttaaatttatagtcattgtaggggatcaaatccccgtcaacagttaggacattccaatttgattttagatccttctcagcagctagtgcactagagaatgatccttcgctttcattaatgtctaattttgaagtagcaatatcaaccaaagtatttgcctgtttctcaggattttttttaacaatatgtcttgaattttccgataatgggtgcccctttatcttgatcccaagttcttttgtccatccaaatggagctcttttaaccacgatggtatccgtacgagcccttaaggcattttctaactgaatcattaatttatatgcactttttggcggttctaaagtcgaactaagatgtgcatatggataaattaaaacagagttacacttaattttcttaagatattctaaagtttcctttacaaagtcttcaattagagtttcatcatctccatgctctatcgatgttaatataacaaccgtatcttctattcgttccttctcattttttaataaaggttcagcgtcatctatttcctttttgacaggcaaatattctacaaaatctacatgtaactgtaatattcgcatatttactaactaaaatatttagtttgatatattccatacctatttgaaaacaaatgaaatgtttttgtttcagaattgatgctgataagatgtgggaatagtggatttcaccttggcgtgttcgaatgatgattctcaggaatactgtacatacgataatccgatttctgaattgcatgatcaattagattactcactcatgtttgtcgtctccaaagtatctgaattatcgaaagcaaagagcttcactcatatcgaagagcttatagaaagagtaattgctcacgaaacaatccacgtcgttattttggaattggaagggagggattcatctgataaattggatgatcttgaaatatctgttacatttggaactggaaggacacatttgattaggatgaattttttgggatacgcgagtgataatactggcttagtaactgctactctgtaaaatctgtgattttgtaattcttgtgttgctggattgtcttgataatctccttcttaacgttgatctttagattcaatgatgaaagttctttcataaatattacctcgtccttcaaaagatactgtccatccttgaatatctgattataaatcaacttttgatgaatggattgtagcttccttaaattattatacaatttggtaatattaatttgacattctgctttttccagcgtccggatcagattcatcttatttacgtttaacaagctgtctgaatacactcggtcgtgtctatttattaccgcgaatccatcagtttcactaaaatatcctatcaaagtcgaaggtaatattcttgataacccgttttttattatttttgaagagtgtttattgtctaatattactatagaacgaccaaatgagaggattgcctcaattacttgattagctagcctctcatcaagtttgtctttatctgatttaatttcgataggatatagagtaattttttcaatattcattttgtaactttctgatattgtttttagtaacgttgacctggcaaaaatattctttaaatcgtcatccatctcaattgtactatttttaatatcctttcttttgatattttttgttttacatgctgccaatattaaatcaaattttctatttagagcttcatttttgatttcaatatatttttcatagtggtttgaactatttccaaaaaagccgtttgtgggatttaggtttagaaaatccaggaaccgatcttttagttgaatttcattcatgctgtaaagttgctattcaaaacataactttcaatttgggaccttgcaaacagccttcaaacctttgacaaaaatgtctaattctgacatcatcttattgcgatcgtgctcattttttctaattatgtcgataagggagcttcctacaataatgccatctgctccagcctcaatcattctctgtccatctttgggagtgctaatcccaaagcctactgctaagtgtttcctatatgaagaaacaatggctttcgaacgggatatagattcgaaggtatatttttcaaatttgtttctcgatccggtgattccaaaaaccgataccatatagacaaaaccagtagacagggcggatatcctccttaatctcttggtacttgtgttaggggagatcaggaaaacagttgtaaggtccaatttgtttgttattcttaaataatcatcagcttcttcaaaattcaaatctggtactatgaaaccatctatctcacagtttttagactggattaagaatttttctaattcattagaataaagtatatttgaatatgtcattaatagcagcggagtttctttatgtctttgcttgattgatttcaccaaatttaagcagtcttttggaacaatcccagaattgagagtcttcaagaacgcctcttggataatagggccatctgccatcgggtcagaaaagggtactcctatttcaataatatcaactccagattggatcaattgttcgattatctctctagaaagttccagtgtaggatatcctccgacaacataaccaatcaatgccttttcattcttttgtattaaatcattgaaagttcgagtaattttattttcaattttcaagtacgaccaattccttttgattgggtgttcttttgaacaccttcttctgagatggagagataatcccttactatttgcaaatctttgtcacctctaccggatacggttattacaacattttcatccttcttgaaattcttagcatttttcatgatatacgcaattgcgtgcgccgactccaatgcaggaattattccttcaagttttgacaatagtacaaaggctttaaccgcttctttgtcagttacggaaggataagtggcgcgatcagtatccattaaatttgcatgctcaggtccgattccaggataatcaagtccagcagaaatgctgtgtgcctcgcttatttgtccattttcatcctgtaaaaagtaacttttcattccatggaagatccccattcttccctttgacaacgtggcagcatggaaccgtgttcgaattccctgtcctccagcttctactcctatcagtttaactttcttatcattaacaaaagggtaaaatgatccaatagcgttactcccgccaccaacacatgctatcaccgcatcaggcaattttccagttagtttttgtatttgttcctttatctccttacctatcacactttggaaatctcttaccattgtagggaatggatgaggtcccataacagaaccaattaaataatgtgtatcgcgtacattcgcaatccaatctctcagtgcttcatttatagcatccttcagtgtttttgacccagaatgtaccgagtgcacttttgaattcaataaattcatcctgaaaacattgagttgctgtctttctacatcctttgcgcccatataaatttctgatttgagattgaaaactgctgatgctattgatgttgccactccatgttgcccagcccctgtttcggcaattattctggtcttgcccatttttttagcaattaaagcctgtcctaaagtattgtttatcttatgagctccgctatggaggagatcttctctttttaaataaattcttgggcctccaagttgattggtcaaattattagcataatagaggggagttgacctgcccgcaaagtttatcaataaaccgtttagttcgcgttgaaaagacttgtctactttcaatctctggtaccatttgtccaaatcttctaaggctggaatcaatgtctctggaacatatcttcctccatatgttccaaattttcctaaatcagtgttatttttcaaatatatagaaatgaaattagtcagttgctacataatactttatcgattaaaactagctctcgactaattctcttattttttggcccatctctttagatttctccattaaagttgtcccaatcaaaaatgcatctgctcctgcactctttagctttatgatatcctttgggccctttataccactttctgaaatcacaatattgttacttttggaattttcggataatatccgaactgtcgtgtccaaatctacatctagtgtacttaagttcctgttattgataccaattaggctaaagggtttttttgatttactattactctttacagcctcactaaactcaatttcatcatgagtctctaagatcacttccagaccgattttctttgcatactcggccaatgtatctaggcttccctcagtcaagttgctgtcaaagattgtctttattagcaaaatggaatcggccccggctttttttgcagctttgatttgaacgtcacttaccattatgtctttcatcagaattggcacagtaacatgcttccttgctctcaaaatattgcctattgatccattaaacaagtatggctgagctaaaatcgatataccgatagctccagcattttccattgtcgtagcgatttcctcgacattcatatcattatagtctactaatgttccctttgacggggatgcatactttatctcggttaggattggattctgcttgcatttaagaatgttattctgcatgctcaaacaagtatgattgctatagtcgcgctctccataaatttcgtacattccatcgtcaatagctttaaaagagttcttcacgagtgtttttagcatggatttcgtgctggaaaatctaagattatttgttgtcatcttggtgggttaaattaatgtggtagaaatggtttacaaccttttaactatagaaattgatatatctatcttttattttagtctctttctgattcttcatcacaccaatcaagatatcaatgcaggtattttcagtaatttcaccaaatgcaacttgggtggagagagttttcaaatcaaggtgactttcaatgaatgcactcttacttgataatatttctgatttttgtatcatttttttcaatctcaaactgtgataatttatgtgaatttcgtttgcttcttcatagtctacaccatacatatctgaaatttttaagttgaggtttttttccttctctttgactatatcctcatgtaaagcatctatggcactcttccctttaatgggctccctattatcaataccatttttgtcattatctttgccaaagacattgtcattattttcaaaagaattcatgatgatatacttattatatgtgagataccataataaaacttttcatcttagtaacattaattttcgctaaaataataataaacacttaattaacatagattcaatctacattttctataaagcaattatgaccaattctccaaaatttatatttgtaactgggggagtaatgtctggcttagggaaaggaatcgtagcttcatctatcgccaaattattacaactttgtgggttgaaagtgacttgcataaaaatagatccttatttgaattatgatgcaggaacaatgaatcctctcactcacggtgaggtgtttgttactgatgatgggggtgaatgtgacatggacattggaaactacgagcgttttctcaatacgagtttaaaatcgagccacaatttgactgccgggcgaattttttcaaatgtgataggattagagaggcaaggaaaataccttggccagtgtgtacaaataattccacacgttacggatgaaataaaaaaacagttgagaaagatatccacagaagagaatctagaaattatggtcgtagaatgtgggggaacggttggagatattgaaagcttaccttttttggaagcattaagacagatggagttggaagacgggtatacaaatactttctttgttcacgtaactttggcccctgttctggacgctgtaggcgagcaaaaaacaaagcctacccaacatagcgtacaggaattgcgcaggataggcatacaacctgacttattggcagtgaggtgtagaactccattaaccaaagaaacgattagaaaaatttcactttttgctagtattccgacggattgtgtaatgtctagtcatgatgcaccttcaatttattctgttccaagaatattgtatgatcaggggattacgaaagtaatttcaaagagtttgaatttagatttatcaccaagaattttgaaatggaataagattgccaactcttttctaaaattcaatgggagtgtgaaaatagcaataattggaaaatacgtagaattgaaagacagctatgtaagcgtatcacaggcggtactacatgctggtgctaaattcgccaaggaaataattatagattggatagattctgaaaagttggaattccctggttctaacaaacatggtacaaatactaatttaaagattcttgaatgcttaagggaatttaatggtattttggttcccggaggattcggaagtaggggtagcgaaggtataattaattcatgcaattttgcaagggtcaatggtgttccttttttagggatttgctttggctttcaactggcaatagttgagtttgctagaaatgtgtgtaaactaacgggtgcaaattcaacagaaatcaatccggagactaacaacccagtggttctatatatgcccgaacaaaaacaaatcaaagcgatgggaggtacgatgagattagggcttcacaatattcaaattgaacctggttctattgcttcaaaaatatatcgaaaaaacattgttcaaaagcgccatagacacaggtatgagtttaatcaaaagtatagagatctggtagaaaacaaaggaatgaaatttactgggtcatcagatgcaggaaaaaggatcgaaattttagaaatacctagtcataagttcttcctaggtattcagtatcatggtgaatttcacagtcgaccagggtttccagaacctgcatttgaaaattttataagagcaactcttgaaaataagaaataactaaaaatcttagatcctagatttttagttcataaattttttggcgggcatctctgagagatattttcttttttacataccctctatttaacaggtgagataatgataacctaattgttctctctggtaacattgtcttattaattaaatccttttgggtcatggcgccttcatactctagtgtttttagaattagtttagcacttggtggcatacgtaaaagatcttcagcgtactttacctttttctctattattctggtggctgaataattgttattaagcgtaattaacctagcaggaaattcatgtttgttgcattgtaatttatctgtaatctttacacgggatgttccatccaatattacctcacaatggtgactcgacgtaatgtctactatctctacaaaactttcatctgacacaattagaggccttctagtattgtccaatgagttgacagataccactacaacaacatgtgaattttggagaacaattggaccacctgctgacatagcatatgcggtggatccgataggcgtagcaataattactccatcactgttatcatgccaaatatctttattgtttatcctgagaaaatgttccatcaggatggcacttttgttcgaaaaaattgctacgtcattgagtacaggttctatttctttcccatcaaccttaactgctagtctttcttcctctcttatttcgtaattaccggactttagtgaatcctttatcgaatcaatacctttgacgtcgatctgggcaagaaaaccggtagaattcgattcataaagtcccaaaacaggagccgactgcaccgatgtcttgtgaaaataattaaggataccacggtcaccgccgggtaccaataccatatcaacgtccttggcaacatcttggtttgaactattcatgatctgcgtgtgtatgtgtgattcttctagtgtttttaccacttggcttaacatcgttgaatctttaccggtaaatcctgacaaagcaattcgcattataatgaatctttgtttgattaaggtaatttaataaagtttgtttttatttccaattttatcttctaatcaacgaccttaaaatttatagtattatagaaataagacgcaaacctctcaattgaattcattctttctggaactttttgaactcccttcctttttgattccagcgaagaaatcacggatcccgctccaaaacaaatcgcccaaagcgggtctcgttcttttaaataagcgcatgtgaatccagtagcaagaatgtcaccaaggcccgtatgatcagggctatcaatttttttaaacttaattgtatatacaatattcttatgcaaaaaaataatgctattactaccagttgatattataaattcaagaccaaatttgtctcgtaactttatcattccctcaattgaattagttcctccggtaagagccgataattcctccgggtcagcttttatggccgtcactcctttaagatctaaatcaatacttttcctgtttaggattaacccttcattgtttttatatcgtagaaatccttgcggatcaaccattatgaatttatccccgtaattttccaccactttgcggagagtgtcttgagaaatttcttcaaatatgggactcaataagaacgcatcactatccacaaaatcattcgcattaatctgcgaacaacttgacaagaggaaaagctggcgtccactacccccattcaaaataagcctaaattttgttgtagggtttgacttgtcaatttgattttcggttacaactacgttgcaatctctcagcagttgtaattttggcacaatatcgtttccaactctagtagcagcaaaagtattaaagttgaatgtttttgctaatagagatccatagcaaactggtcctcccagactttcagtcttttcaccctctagatctataatttcatctagggccacatgagaagcaatgcagattttcatgaattttatctttcttagttcaaaattttaaagcaacataataaggttatcataagatttaaaggatagaaatagtttcaaaattattggatgcctaagaaaagaaccagcaggggaagaacgaaaggtggaaaaggaagttcaggaaccgttcattgcagtcaatgcggtgcgatggtgcccagagataaagcaaagaaaataacaggaagaatcaccctggtagagcctcagttagctaaagaattgaaagcacaaggtgcttatattgccccttcaacagatgtcaaattttattgtgtttcctgcgcagtacaccgaggtatagtaaaagtaagatcggaaaacgatagacgaaactcaggaaaattaggctagataatttttttaatactatagagtcttatttgtatattttaatgaagagtgtttaccaattagcaagtttcattgcttcggtaatatttacttgattttttaaaataaaaaaattttgtttttattggctattttcaggtttcttatcgtcttgagtagatgagctagatgttgtatcgtttttgccactatcagtttcactagatgagctagatgttgtatcgtttttgccactatcagtaattttctttgtaaatttcttataaatctcatcctcaccttcttgctcaagaccaaaaataatatcagcaagatttcttcctgtttcgtttggatcagtctgatctaaatattgagcttttgtagttgttgttgatgatgatggtggaggtggggcttttgtagttgttgttgatgatgatggtggaggtgatgttgtagttgttgttgatgatgatggtggaggtgatgttgtagttgttgttgatgatgatggtggaggtgatgttgttgtggttgatgatgatggtggtggaggtggggcttttgtagttgttgttgtggttgatgatgacttggaagttttgtctggagttgtcattttcttattatcgggtttttctaaataatcattaacattcttggtgatttttgataatgaagttggtggttcattaattctggatgtaatagtaccagatgaagcctcatattcatggtttctgctggacatatctttgaatgtttgtactgaaaacagaggtgtcccgaactttgtagagactatttttaatctctcaagtacagttacagctgctaagattgaaataatccatagggctacagatatgttttcttggaacggtataaaaccaagaaccacaatgatgattattctttcggctctctctgcaatgccttttccttttaggtctacgcctaacccttcacctcgggctcttgtatagctaactaacaatgaaagcgaaagagcaattagaacaagcactgggtttgtaaaactgcctattaggatacctgtaaatatgattatttcagataccttgtccaaaactgaatcgagatatccacctaatgccgaagttctctttgttacccgggcaaccgctccgtctacgacatcaaagaagcctgctaaaagtaggaataaactacctaagaatgtagcagtataccaatccactccaatcgcaggtgaatgtaaagaaaacataatagctgatattattgaaagacctaaacctacccatgtccagaagctcggtccaaaacctaaacttgcaaatcctctccctaccttctcaattataggatcaaatctatttcttaagttgttaagcacgtaataatttgacccgtgtcgtaatatataaccttttactattttatattccggcgtatattctacccttccaatttctattgattccagaattaaaataatataatattattgagaaatttatttcgtgctgaatgtatcttaattctttaataatttatgatttgactatgactatatttgtccaacgaaaataagtcaaaaaatttatcgtttacacgcaacaaagtagttatcataggacttggccaacttggtcttccagttgcaaaatatgttaaagaacatggttttgatacttatggatatgatataaatcaaaaaaccatgcaatcagctgaagccaactatggaataaagcaagcatccaactttggtgattttgacgtactaattatctgtgtatctacacatagaccagatgatatgtttacaccacaagtagatggtttgatgtctgtagttgaaaagttatctagagaagctaaaacaggcgcactaatatcaattgaaagcacaataccaaaaggtacatctaaaaaagtatttgaaaaagtagaccacagactacacgttgtacatgcaccacatagatggtatgcattagaagaagaggttcacggtgttaatcaattacgtattgtaggaggtgtgagcaactgctgcttgcaacacggtcttaacttttatgatggacgggaagtggtatcccagacaacagaaacaacaaaggctgaattaacagctgggataaaaactctatcaattccaatgcatccagtatcgtcagttgaagtagcagaactaacaaaaatagtagaaaatgctcatagatatcttcaaatagcatttgcagaagagctttatctctattgcaagtctaacagtatcagtttttctgaattacgtgaatcactcaatacaaaatggaatgtagaagttctagaacctagggatggaataggaggtcattgtcttcccaaagatacaagaatgtttatcaattcatctaacacaataagaagcaaaatacttcaagcagccatggagattgatgaggactatagagaatatttccaaaatgctaaggaacttaataaatcctgtgaagaaaaagactgtgaaatcataaaagcactaagatgaattaactaatgttaaatgatgcaaaaagtgaaaatattctagtttttggtgctcatcctgatgatttggagataggaatgggaggaaccgtagcaaagctatctagactcggttataaggtgaaattagtagttgccactttacctaattttactcaaagtgataaaaaagacgagaggagaatggaagcagtaagatcctcaaaggtaatgggatgtcctgagccagacttcctagaccttcctccaggagaaatgactcatagcagaaaactaattggaataatggacaagtacatgattgattataaacccgtagcagtatttactcaatggataggcgattcacatcaagaccaccaagcacttaccaaatctgtcatttcaggaagcagagatactaccgacttgtatatgtatgaaacgacaatcccaggaggaatcacagaacaagcatttagaccacagttattcatagatgtatctgactatatggaaccaaaaaaatcagctctaaagtgctttgaatctcaacaattaagatgtggtccgatttggatcgatgcaatagaaggtcgagctgcattcaggggataccaactaaattgcaagtacgctgaagccttcgaagtaatccgaatttcaaagtggtaattttttacaatttttaaaaactatttgtaaatattagtaatgctgttagaaatagtctacaattgaagagtttaatgttttgacagattttttttgcaataagactctttcatattttttcttatcaatgtaagtttcgttccaatatctaaaacaaacaagcgatttatgatccagggtttttatgtcttcattaaataaaacatttctgaccattatgtcaggctcatttattcccgccactgttctcattggaccagaggctgaaaatcgaggattaatttctatgatcttgaccttattgtcatccacatctattcgagattgaatatttagtgggccaaaagttcttaatttctttgctatctgattgcatactttcgtaactttgggatatttgtctataaacgccttataggtttgaccgtgttttagaactttcttaagcgttatcgtggacatgatctgatttttttccttgcctagagtcaacccggtcgtatattcatttgcatcaccttttagatatttctggatcatcggtttccaccctgtctgagttattgccttacaggcaaattctaactcttcaatagagttgacgatctgaaatagcttcgagccaaatccctctcgaggttttaccactagtggaaatctatagtccttcataaagtcgtatatctcatggtgcaaacaagttggaatgaaattcagattattttcttgtaaaaattcatttgtcctgtatttatctcgacacaattccactacttgtggttgactcgtaatcactattgcaccggttttctcctcaataagatctttatttttacataatacaggcagttctacatctgatcctataaacagaacttgaattttgtttctattacacaaatttacgattgattttaaatattctttagccgttggttttgggataagggagaatttgtgcgccctatataggccggaggcctcataattgatatctgttgctaggattttgtattcatgtcctttaagcctcgaatacttattatgatatttcaatgatttgattatgccttgtgctactattccaccggctgaggtaacgacaatattaatggttttcatcggactaataattttaaatgatttatcagtttagcagcactggtttagtcaaatcattattattaaccaaattgtgagaccattcgtgctcgatatgttccatctccatattaacggcataatcgattatacaagattttaatttcaatgcatttttagatttttgaacgttctttatgacttccttaatttttctttgttcttgtttatagtaaaataaattgtttaagagaccatgtaattgttctttattcttataaatttcatttcgcctagatatcaggggttcgatttttttcctcaactcatcattcttataattgatatcaatgaagaactcagacatactagatatattgttctcctctaaatattttgatgcttctctttgggcaatccctgtaaaaacatcgttccctgcccagagcatcatagcgggcaaccttatctgcatttcatcaaagactttctttcctacaatcgtatatcctatgctaccaccagtacctgagatatagccagaaatagccaattctctcgataatagaagcaagattgggattgctcgtggagaaaccatatcgatcttgttctctggtattgagacctttccattcgtgccaattgataatgataaatttttcttgcacgatatgcatttaccgattagtacaatttctccattatccttcctgcttattttagaggaagccttgctgccacaatcacagtgtaaccataagggagaatgcttatttaggttggcgcttaccccagtatatattccatgttctctaaaataagtttctgatatctctaatgatcttagataattttcattttcagataaaaggaagttgtatcccctttgaaatactcgagaaagatctgatagatttacaaataatgttttataattccaaaaattattggcgatctttgacatgataattgaattgaattcagaataattatcagccagtaaaaacgcatcctcaactatattccagaacttttggaatctgtcatacaaacccttaacttcagactttgacaaatccttgttattttttatccaattgtatatctgattttcccaataatttattaaggaacgagtcggtgagtcagtcttacttgagatcttccatctttttgaatcgttgattggatatcttaaatcaagtactccggtggcatttcttatactaggcaattttgccacatgcatccatttatcatccataaaatcatgatcaactatcaaaaacaggggaacgatagtgtgattttcccttttggagtgattcgcaagtgactctaataatactattttcttaaacaccccactaaatgcaaataaattgggctggtgaattccaacgataatttttaatctttcatctgataaagcatcaatttggtttattatcttctcattaagagttcctgcctttgcgtgaaaatttgctgtagcttttctgagaagtttacgatttgagccaataaattcatctgttttaggtactggattttcgctcaaaatatcaactgcttcgtcgaactttgacgggatggattgtacaaacttgctaatatctgaatctgaagaattcagatatctggagaatattgcacttaatttactgtcaccgtcaatagtggctaccgtattacttcccaaaccttttaatcattaatatctatttaagtttctttttaactatatcttatttctcttctataagatttaccaaattctttattctattaaaattacctatatcattaatggcatgtgcatcgctacctagatggaattctacaccgaattctttaaaaattttcaaaaattctatgggtggccgtacatattttgaattaatttctatttttttcccattaactactaccaattccgctaaatttcttaattcagattcatttactttaaaatcaatctctggagcgagatgcccaattacatccacattaggattttttattgcattaattaacgctccgtaccatttttccttggtgtattttgtgtgaaaactagcgatgataaaatactcgttgtttaagtactctgctgggcaatcaacttcaccgtctgctaatatcttggcctcaaatcctctgaggatcttgattttagtctttgggatgtagtagtttatttcatcgatatactttttcgtccaatcagaattttttcgtacgtgctctgtaatagctatcctttctaagcctacagactctgatttatctataatattaggtatggttaaatcctttgaagaatggtcattatagttacaatgtatatgcaaatcttctttcatgtttagcatcataattttatctgaaaaagttatgcaaatatattttataatttttcttagttaaaacgttcaaaaatatttatatcattaacaaatttaactctattaaaaacggatgcccattgcgtagaaaaatatccacagtattgattcccggtgcttctgcacctgctggaataaatacgataaaatcattgagattatcagattttaagggcaaaatattatctacggactctaacagtttatctgcaggtttttatttatctgactactatgaggtgataccagaagctgaagcagaagattatttggaagtgctgcttaacataatcgacaaatataacatagaaattttaatgccatcgtcaggttacgatatttttccattcagtgaattcaaatctaaattgaaaaaacatggggtgattcccgtcgtgagtgaccgaaaaattttggaaatttgtagagacaagatatacacatttaatcatttgaacaaatttttcaatctaccctttaccacgttagatccaaatgaaattgatacttatccggttattgcaaagcctcgttttggaaagggcagtagggatgtaattcaggtaaacgatgagcaagaaaaaaaatacatttgctctaaattcccaaatatgatctaccaagaatttttgccaggagatgaatatacaattgatgtcatgagtgatctggacggcgacccgataatatctgttccacgtgtaaggttgcagacaaaaagtggtatttcaacaaaaggtaagattattcttgataaagaattaattgaagaatccatgaggatagtgaaaaaacttaaaattattggaccctcttgcgttcaaatgaaaaaagacaagacagatcaattcaagttggtagaaataaatcctcggcttggcgggggtacaatttttacaactttggccggtgccaacttccctaaaatggttttggatttggtcgaaggaaaaaaaatagatcctccaaagatatctgaaattactgtattaagatactttgaagaaattgttttggatgaaagaaacaagattaactacagcggaaaagaccttctagcaagtaatccatgtcgtatatgattgaagaaattgttttggatgaaagaaacaagattaactacagcggaaaagaccttctagcgagttatgcatgtcgtacatgattttgtctattgctcctgttgaattttgaagtgtatcaatttgaaagtattggcctgtagcctctagtatctggcaaggccacaatccggtcagattcattagtataacacagaaacctattgtcattgctaaagcgactataactacatccgtatatttaaattcaatttttgatttcaaacttgttcccttatttaatttgttctagaaatttgaaagtgcacccatcatctccaaccagttttcttaatggtaattgcagcgtaaattaagagccaagtataaacataggtcgacaaaagctggaaaaaaggcctatagacccaattcttgtcgcctgggtttctcagtctgaaatcaacaccataaatcatcccagtaaacaatactcccgcaaaccagacaataggagttataaagtcaccggcaaggggcataaatatgacagtcgtcgccacaatataaggcctgataaatttcattgaagtttgtaaatagtataaaagtgctacataaaatggcctcttccaaaaaatacctccagcagcaaataaacttcttataaaactcttcctccatctaacctgttgttttattaatgaatcaagtgttggtggaactccaatatttacccttatcctttgcgaatacagaaccttccaatatccgtggacatcttgattagattcatctagaccattctcgttctctaacatattttcggacatagaactcttggcagtaccctcagcgttgaggattggaatctgggcatattgttggctggttgatatgttagaaatctttggaggtcgagtcgacaaaacataggccgtcattcttctatctgttgcaaatttgaactccatacctaggaatctgtctcgtgcccatagaggaataaaatcttgtatagcaacccgtctatagaaactaagtgatcccgcacaacaactaacggaataaaaaacggtttccatccctttttgtgccctgcaagccccatcggcgtagacgtcttgcattttctcaagaaagtgatcccgaaatcctccagtgtgtctgtttttaactcgtccatgtccagtgagggcccctacttgtttatctgagtaaaaaatctgcacagccttttcagttgcatcagcagccatgtcacaatcactatccatgaaagcgtaaatctcgccgcgcgcaatcttgctagcggcctctatagcctttttctttccaaggctttccttaagatgtactattctcaggttaactgttttgtttttatccttaatcgtgtctagaatctcaccagtcttatccgtactaccgtcgtctatgacgattatttccttattcttataagtttggtcaatgcatgactgtatacatgtactaatgtcggcttcctcattttttacagggactacaatagataccagcggtttttcgttctcaggaattaccttatcgaaatttttaatgtatgggtctttataccgaaaatacgaaattaataaaatattaaataaaataaatgaagttaaaatgctgtagatacctactcccaggtctatcacatatatggtcaaataaattttagtgaatagaattaccaggacggatgataagagtaataccctaacaaaccatcttttattatccaattcctttgtattaatgaaattagttggattactcaaagccaaacattaaatcaactcgtcgatagattagttgaaataaagatgtttattacttttttcatattagcttcttagaattggttatatgagattcttatagtagaaagataagcaacagaaaaaggatgatgtaaaaatagttctaaggtaatcagagtattgtctaattccatctcaatctttcattatctctgtcctccttggaagattttttccaatctttgtagtgattcctacataaatatacgcgcttttttgaattatcaaaatctaaatcttgtgacattttagcctttgccaaactcattgatctatccgcagtctcttcgcaacttaagacactgcaggtaattcccttctctacctttcccattaaaaagcaaaagccattataatataataaagttaatggaaaatttgacagcagcttataatgtaaagtattgagccactggattatgtacgactatagcagcagtagagaattcaggatcaatttgtccactttcagttagagtcattccactaattgaaggattcaataatttccataccatgaaatgttgggttatatctggacaacttggataaccccaactgtacctcaatccacctacctttaaccccactcttccttgattttataatttacccaatctgctaaagcttcagtcgtttccactgccaacccgtgtaggtagtaggcatcagtataacgaccttgtttattccattcatctattgtttcagcaactttatttcccattgttactgactgaaatgcaactacatcatcggattctgaatcaaaataatctgcaagacataaatgtgaagaattgctagacctggggaattcaaacgttagttctgaatcaatcttagtaccgtcgtggtattttactgcgaggctattgtttcctacctttcgacatcgaaaataagaataaactgcgtgaggatcaaataatttctcctttacaactttgaccttccattctttaagtagttcttcaaactcgtctttcaattccgtagctttttttcccctcaatccccacgacaagacaaaaagggatttcttattcaagtattgccatatttctttgagcggaaggtcattattctctagtctggttacaaaattaaatttgggaggtacaggtttatctcttactggtttcacgctgcttaatattttacttaaatcttgcgcattggtagcctcgttatattttctttctttccaacttgatagtttttccaaccatttattcatgtactcttctttactaccgctcatcagattattcatcaccttcagtccttcaaaggcagttttgcagtaaaatattccagctttgtaaatattgccatccccctttgctatcctattaatgtaatcgctattaattgcagcaccaccgcataaaactggaatgtccatcttattctctcgcaaaaattctgagaaaagctgcatttgttttgatgtcgaaaccaataacgccgataatcccacagcatccgcgtttacttctttaatcttgtttacgatactaggaattggaacctgtttccctaaatcaaaaacttcgtagccattgttaaccaatattgtctttactaaattttttcctatatcatgtacatcgccatatacagtacacaggacgatttttcctttgctaattccctcttgttttatcaggtatttctctagctccaaaactgcagccttcatacattcggccgattttagaacgaaaggcaggatcaattctccagcgccaaatttatctcccacttctttcattgcaggaagaagaacttcatttagtgtttctactgaggcctcatgtaatttttctttattacctgaaagtgttttcctcatcgtaccgttttccgataattcgtctagtatagaaaaatcatctttcgatgaaattctctctgaaatagataaaactacatcgttttcaattccatcttttagtctattaacaattctaaaatagcactttttacctgcatcccaacttgcatccatttccattaaattgttctgtttttggatacctgtggatgctgatgctgttcctgtcccatcagtagaattataggaactaaagtaagaaatcaattcagacaatgcattattattgttattaaaaataagatcttcgcaaatccctttctccctagaattgatttgagggtatggtatgatatctttaggattaattatcacagtatcgagaccactttttattgcgtgatacaagaaaactgagttgagatattttctagctagcggcgataatccgaagcttacgttacttaatcccagcgtcgtcaaagactttggatatttttcttttacgaattttattccatctagagtatgagcagcagatgcgacatattcttcctcacctgttgctaacgtaaatgttaatacatcaaaaattaactgccatggttttagacccacttcaattgctttgtcatgcaaaattcctgcaacttctaatttttcctgtctagtttttgccatcccattgggtcctatgcacatcgaaaccgcaggtgctccgtatttcttcatcagcggagtaatatcattaaatctactcccatcgccttctagattaattgaattaattataggtactccaggaatttgcttgagggcagtagcaataacttttgaatccgttgaatcaattaccaatggtgcctctatttctaaactaagcctcttgacaattttttgcatgaaatcctgttcatccgaccgttctgttgttgcaacacatacatctaaacagtgtgcgccatcctcaacctggtatctcgctaactcaattaatccgtcaaagtcattctcgagtaccattttcttggctttctttgatccttgagaattcaggcgctctccaatgattaatggacggggattttgatggagttccaaagaagttaatgcagaagatacttttggtttttcattgtaaatttttttcatattaattacctgtctagattatcagaatttaggtagcagttccgtcttcaagggataaacttacaggggttttattccttgagttaagcatggagtgtaaatgctttatatgatctactgaagtaccacagcacccgccgattatttttaacctttcatatttattcacgaattcggaaagttttagagtgatttcttgcggagtcatcaagtatttagccataccattttcattcactggcattccagcattgggcatgactaagatgggtaactcatcttgttcgcataaccattgcacgctaggtgtcatttccatgggtcctgtagaacaatttaagccaaatacgtcgatatctaaattacttaaagttgtatatgctgcctgtacacttgatccaagtaacattttcccatattggtctagggttacgttggtaattaccggcaaagtcttttctaacttgttcatagcacgaaagcagctttcaacagcaagtttcatctctagcacatcttgtcctgtttcaattaggagggcatcacaacctccaattatcagtccctgagcttgaacaaaaaatgcttcttcgatttctcccaatgaaatattacccagatccgaatcgtttgagctaggtaaatatcctgatggacccatcgaaccgattacataaacttcacgacctgtctctgtagccgattctttaacaagttttgctccttgaacattaaaatcgatggtcttatccccctgcccatattcatctaatttaagtttgttgctaccaaaagtattggtttcgatacaatcactgcctgctttgatgtagctcttatggatcgtctttatccaatcaggacgggtaaaattcaaactatcgttaaatccctccttattattgagaaaatcgttttctctaggttcgtatttttggatttctgtacccattgcaccatcaaataaaagaactttagtcgctaagtcattaagaaagccattcaatattattattattttatttaagactttatttgtttataatcctttcacccacaccaaagtcaattaaaaagagatttatagaaatttactatttaagaatactgggttcatagttcagcatggatagaatgactgcctgcggagcagctggtcgagggttcaaatccctctggacccgattccattccaggccgttgcatgtccgcatgaacatcatccacactttatttgggtatcagatttctattaattggataattattactgactatagagtgcaatattttgaattcttgaattctttaagataggttaatctaaggacattttgtttaatctgtcccttaattctctaagtaatgttttatctagtgtcatctcttgaacattaattatctttctatcctttttgatctttgtgcctacaagatattgttccttgtaaatatccctcctatgtattttgtatagatcattgatatacaattcttcagggtatgattttatactatcttctactaccatctagttaaacaccaaatagaatacttattcccctagttaatatgcttgtactattaaagtcttcaaaatcttagtttcaacaagtgcgtgatccttaacctatatctgctgggactgttacaataccctttccctcaccgatcttacctaatatttcacttttgtttctgaatatgaaccaaaaggatagactattacttgggatgaggggcgtacaaagattggtcttttcaatgttctttatccgatcctatcctatcccatcttacgtagaatgttgaataagtgcgaaattgtcaaaatactacgtcattttgttaaataacattctgctaattttctggtgtttatcttgtcgataatatcagagttagttagtttcaatcgtactggaccagtttgactgtattgattcaatttggtttgatcccggtttcgaatacttgttctatgaacctattttcgaatctaaatactactggagatttaacctctaatggataccaaatagttttacggcaataattactggattgttcttgggtgtgtcataaaaggtttaattatactattttatctatattattaatgacttctggtaaatacttcaataaaggtgttaaagcattagatgaaccaaatgtaggatatgtagtcagagaaacacctgataaaataatagtatttggagaaaaaaatgaaaggtatgatattccaataaaggatattcaacaagtaggcgccaatgtattgattggattaaattttgcagacttgcttaaatatgaagtgtcaagagatgcaccccttccagcaggtagagaagatccttggggagaagcagataagttggtggacttggcatcgtatgagggtaaatatccaaacactctatttaacaagggtgtccgagctaagaatgaagaccatgttggtcatgtaatgaaggagactaatgataaaatagtgatttttggagaaaataataaaagatttgatgttcctaaatctgagatttatcaggtagggatgaatgtcatactcaaagttgactttcctgggctattcaaatatgaagtacctaaggaagcaccgttacctacgggtgagcctatcgaaacaattgatacagaggcatttcctgaagaatatcatggtcctaaataatacaatatattaaactccttttttgtttttatagcttaacgaaaattgatatttttatgctataatgattgctgtatattatcttgaaaagattttagactattaaaagttaattataacctaaaacctgaataattagatttggtccgaatagattatctaactaaggcgctatttgacaatctaattaaaggatcctattatgacaattcaattctacaaatcccacatatgaaatgattatgcctccgagttgaaagaaaccaatacagggcaagtagattgtgtgataaatgtggtcgatctattacatttaccagaaaaaatcttctaaatctagattcaatcattacccagtaatctcatcaataaaaagattgaatgtattaaagaaaaacacgcttgaatatgaataaatttaagcggagaataaagatatagcaaatgataaaggataaagtcataataatcacaggggcaagtagcggaataggatatagaactgccttaacgttgtctggagaaggagcaaccattgttgcaggagcacgaagggttgataaattagagagtttaaagcaggcagttaaagctcaaaatggggagatcctcataaaccaattagatgttacaaagagagaagaatgtactaaccttgcaaattcggccatcgataaatatggtaggatagatgtactaatcaataacgcaggtcttatgccattgagttttgtaaagaacctaaaaatagacgagtgggatcgaatggttgatgtaaacattaagggtgttctatatagtacagcatctgttattcctcacatgctagcaaataaatctggtcatatagtgaatatatcttcaatagcaggtaggttagtttttccagctgggagtgtttactgtgcgacaaagcatgcagttaccgcatttagtgaaggattaagacaagaactaagccaacgatccaatattcgtgtcacttgcatcgaaccaggcgtagttgctacggaacttaataataccattaccgatagttcactacaagggtttctggaatcggttaaaaaaatggagccgctgcaagctcaagatatagcaaatgcaattctgtttgctataaattctccaaatcatatgaatgtaaatgaaattatgataagacccgtgcaacaagaaagatagccattacatttttgtagatccgatatgagagttttttgaggtttgaaaatggaaatatactttatcgattggattgtgctttacaaaacaaatctctctctataaccttgccattttatcagattggtcagaggatccttgatagtgatcgtagttactgaggtcccataatttgataaacctctttaacttcagaatgataggatgggaactgcactaagtatatccttcttgactattgccatttcctttcaattagtttttttcttaggtcctgatgaaggcatgtctgttgggggggattaaatcctcatggatcaactataccacccaaaatgaccatggatttaatttcagttttccatctagttggacaattgtcaacggtactcacctggatagcgacctaattactttgactcctccacataattatgatttgtttggagaaaaaatgacatttggaatagagaaattacaatcaaatatgtcacttcatgaatactctaataaagcacaaaattctatcaacgacactgcgagaatttcaccttatagattcaaatccttacgtactttcagatacggtatgggagaggattgtatttacccatgaaacagataatagaatagttaaagttttgcagtattggactattaaagatgattatgtgtatgttatttcatttggtactacaccagatagttactttagttacattccaacaatttacaagataatttctggtgttggaattttaacaataaacacaacaattattccaacaagtaccactaaggaatccatttatcagtctccagaagggtttgctttaaaatatccgagcagttggaataaagttttggggcaaaatagagtatcttttatttcgaatcaggataatcctcatgatcattatttggaaagggttgatttctaccattatatgagtgacgctaatttatctggtcctacgtacagcgaaaaagatttcttaatggcagatttaataaatgaaattaggtatctggcgagtaacttagagaaccttgaattgatttcattgaaagatatgaatttctcagagtttgggaaaagaactcgtttactcctacaattcaactttcgggcctaccgagtctaaagaaataatgataagaaacaacactcacttgtatgagatcatttttaccactcaaaaggatgaattcgataagttttcttctaatatcaatagaataatagacagtttctatctgggtaatgtcaagttggagtaatttgtagaatgttttgggcatgtaatacatttatatatttacttttggaatgaaattcgaaagagacagatagttacggggatgtaatgatgaacaagaatataatttgtagaaaaactcaggatgatctgataaagaaactccacaatcctccgttattctcaattattatcccaacatataatgaatcacagaatattgttaacttagtaaattccataaatgcttgtgtaaaagaccaaggatgctatgaaatagtcatcattgatgataattctcctgattgcactgttgatagagttatcgaggcctttaatgaaaaaaaaggattctatttgtataaaattcgagatactgtaggtgttcagtcacacaagcatttttttatatatccgcttcatgacgagagctttttcataaagatagtaaagagaaaggagcgttcgggtttgatttcagccatatatgagggctttaaatcatcaattagtgactaccttatagtaatggatgctgatttttctcatacaccactacatattaatagcctgattagagagatcaggaattcaaattgtgatctagtaattgcatcacggtacttgaaagggggcagtatagtaggttggacatcaaaacggatattttatagcaagtttgccacaaatttatcaaaacttttattcagattgtcaaatatatctgatcccatgtccggattttttataactaaaagggacgtagttagaaaaatggaatttaacacatcaggttttaagatccttttagagatattagtaaagtcaaaatcgttaaatattaaggaaatcccctatacatttactgataggacaaatggttcaagtaagctcaattcaaaagttactattgacttttttaagagcttgtatatcttacataaacatcattaaaagtgaggaattagttaagattgagtttagacatcaataagcggttaatatcctgtgacaaccttctctagaattctatccttcttacccagtgcaaccgaaattatttttgaattaggacttgagggtatcctcaaaggtgttactcacgaatgtaattatcccaaagaagcactacagataccaaaaataataagttcaacaataagctttgaagaactggatagttcagatatagacaagaagataagagagatgtcacgcaaaaatgaaccattattcaagattgatgtagataaaataaggaaaataaaacccgatttgataattagtcagaacatgtgctcagtgtgtgcaccttttgataaggaaatacagagcacatttgaaatattaggatataagccgcacaatttagtaataaatcctactaatctttttgaaatatttcaaagtatactagttttaggtaaggaattaggcagagcggaagaggctctaaaaattactaatcagcttcaagaaagaattaacaaaatagtatctattttacaacagcccaatgaaaaacaccttgtaaataatcgaccgaaagtaatgtgtttagattggctcgaccctttctatcttgccggacattgggtaccggatatgttagatatagttggagcaatgggtttaaatggacaaggcggtttggattcacaccgaattgacaaattgagaattgaacagttgaaccctgacaaggtggtgataatgccttgcgggtttgatattaccaggtcccaaaaagaataccaaaagatcaaggattctaattggcattcattaggagcaaataagaaaagggaaatctacatcgtaaattccaatgcctttttcagtaaacccagtcctagaatcgtgactggaattgaaatattgagcaagattgttttccccgaagcatttgagcacataaggattccaaattctagcttcgtccgagtctaactaattaatcccattttaaaacaaaacaagagatgccctgcctactttaccaaataacaaacacaaccgtttctcctagtaatatcatagagttttgcaggataagagtgagtattaccatctttattttcataaattgagcctatagggaaaaacacctgagactctggatcgtccaaatcgtcattatatccatacatcaaatttgaaatttcaatttcatatcttattggatatggagagtaactaattctgttccaccactctaccccagtgaaactttgatgaaactgaaaagcaaactgttcccgatccactttgagagagaatttttcatcttcatttgaaacgagatcctttagatagtattccaatcttgattcattatctatgaaattgatttctctatggtacgagtgtcctatttgaggtaagactttagtaaatcgatattgattatgacctctgaaaattgcctcaaaatagtcttggttatcgaattggcaaattaggtttaattctactgcgacatgttgggtattgaaaatttctaacaagtaaagcatccaagatttgtcagggatcctatttcctttgtctcctattattcttaaattatctgtgataattctaaatttcgaaacatcctttctgtaatcattatgtggcgtatcgacacatccgtaccaataatgcatgctaatttacaaatgaatttgtatttattcttaagtactattggattactatttggattggataaactgccatcgatgaaacaaggaaggaagttcaaatctttttttataaggcaacaggatagaaatcttttagattattgattctgagaaacatatggaaaagatctaaaatgattttgcaaaaacaaaaatcagcctcctcacatctttggttatagaaattaagtaaatcagagatccaccctgggtaatccaactctcaaaattacaaatacatgtaattttgatagatgtggaatataataaaatataggatacgtctgacatgatagcatggttgatgaaaacgttgaactcgatcaagtttctaccaagaaaagaatttctcaacctccattaaatttgctttttaatccttctttgatagaaaggaacgatgtttggcaaataaatattgtaaaactcttagagaccttgttatctactttaactaaatcttcttataaggacttacgcgtgtgtggtgtagcgattttgacgtcatcattaattcatagacttaaagtagaatctatctttcgattagaaaaaattgctaataaagatcaacaaggcatatctgaacgtgacaaggaatttagtgagaagactccaattccagagatttctaatcttacgttgccctttagaaaagaattgtcttaccctgtatcattagaggatctgatttctattctggagactatgatcaccgaccttaccaatccagttgtaaagagaacaagcctaaatttagaacctgttgaggtaatagactttcaacattatttgattaaatttgaaaaaataatagaggaatttgaaaataggattatgaaaaggctagaatacggtagagaattgaattttaacgaaatgatgattgggttagacaggatcgatgttgctagatatttcattgctatgctttatcttagcatgaaggataagatagaaattatcaccgggtttaccgatatgaataagggaatagactatttagattcttcccgggagactacaggaagcattaaaacaacagacaacattttagaatggataaaaattgctctcaaaaataacatccaggagtgattaaatgacaaaattgccccctgatgaaatcattgctcgcattgaggcagcgttgtattctgctggccgtccccttacaatagatgatatggttaaagcatccgggatagaatcgcgggagaaaattaaacgattattaaatgaacttattaacaaaactaaagtcactttcaaagctttggaaatagctaactggaagacggtacatacgtatttcaactaaaacccagttacgctccaatcattaaaaagttctctaataagcctcagatttctaattctgtaatgaagacgctttcttatgtagcttatgaacagcccgttactagcaaaagattggtagaaatcaggggctctaaagtatatacgcacctaaaggaactacaggatttggagtttgttaaccaaaaaagttcaggaagggtcaagatatatacaaccacaatgaaatttaagaattattttggaattagcgatttggcaatgctgaaaaaaagtttactattaaattccacaggattttcaaagaaaaacacttaattatagttttggcaaatttgaattgtgcgtaaatctatcgaaaatttgggaggtaggaaattaacaggcggaagaataatacccaaccgaaccagaaggaaatctgaaatagatagatacccaaacgaaccaatagtaggtgataccaagaatgtaattcgcagagttcgagggaataatgttaaagttgcttttaagtttgccgaatacgcaaatgtgaatgatcaggataccaaaaagacaaccaaggtcaagataatcagagtcaccaagaatcctgcaaataaggattatacaagacgaggtgtggttacaaaaggctcaattttagagaccgaactgggattggccaaggttgtttcgagacccggacaagatggtattgttaatgcagtcatcattaaacaataatattttgttaatttagatttaggcaaaagaataggaatttataaaatataattttaatatccttattggtaaggataggaattacggtttttccaggcagtaattgcgatcgtgatgttcatcatattttaaataatattcttcatgtagatgcaaggtatatttggtacaaatcatcctttgatgaatttgattgtatagtaataccaggtggattcacttatggagaccggcttcgagcaggtgccatagcagcacacagcaccatcatgagtaaaataatggagttggcagataataatgttccaatattaggaatatgtaatggatttcaaatacttgttgaatccgggatactcccaggtgcactaattgtaaaccaatctttgaattttatttgcaaatggatgaatgtggtggttactaatactgatactccatttacaaatttatatcataagaatcagaggatttcaatacctatcgcacatggtgaaggaagattcgtgattgatgaaaaatcatacaataaaataaagaaaactaaccaggtcaccttagaatattggaaacataatccgaatggttctttaaacaacattgctgccatttgtaacgcaaaaggaaatgttatggggatgatgcctcatcctgaaagaggtagtgacaaagatttgatcccttcaggttacgaccagggctccatattgatatttaagtctatgattaactattttaagtagaatttgaattaagaatgaatatcctcaatatagaagaatatagttatttaaagaagaaactacgtagagaaccaaacgaattggaacaatttattattagtgccgaatggtctgagcattgttcttacaagtcatctaagaaacatctcaaattattacctatgaaaggggatcatgtgttaatgggccccggttatgatgctggagtaattgatgtaggtaacggttttgtagtaactattcatatagagagtcataatcatccatcggccgtggaaccatatggaggtgccgcgactggggtcggaggtgtccttcgagacatattgtcaatgggctctcgtccaatcgcattgtataatgcattaaggttcggtgaagttgacaagaattccaaatttggttcaaaaaatagatggttgctaaaaaacgtagttaaaggcattgctgattacggtaattgtataggtgtcccgacagttggcggagaggtggaattcgacagatcatttgataattattgtttagtggatgttgcatcaatcggttatgcaaaacttgacagtctcgttactaacacagcaaaaaaaggtgattttctaattttgggtggaaatgctacaggtgtggatggaattcatggcgcctcctttgcctccaaaaaccttgatgaagataaccgttccgctgtgcagattccagacccttttttggaaaaagtgctcatggaagctaccttggaggcgatagaaaataattgcatcaagaccatgaaagatcttggaggtggaggtttgtcttgctgtttatctgaaacagctgatagtttgaaaaaaggatttttagttgatttgtcaactattccattaaagcaaaaggacatgacagatgcacagatcatgatttcagaatctcaagagcgcatgttatatatcgtcaacgcgaaaaagaaattcgaattcttcaaaatttttgataaacataatgtgaattattctgagataggatatgttactgatgatctcaatctctctattattagagagggtaacacattggcttgcatgcctgcacaaattattgctcacgcccctctgttgaataggaaatctaagcgaccatcttatcttgaatcaattctaaaatcgttccgagaaccggaacctcaaagcgatatcaaaaaaatggtatttaagatgttgtctaacccttccctatgtagtagaaaatggatctatgagcagtttgaccatgaagttggagttaaaacagtatcaaaaccaggagcatctgatagttcagtaatcaagcttgacgatgataaatttctgagtttcaacctggatggtaactccaaacattgttatttaaatccatatgagggaatcatagggtgtttggccgaatcactcagaaacctgacttgtgtgggagctcgcccattaggaatagtagatcacttacaatttggcaatcccgaaaatgaagaaattttttggacattcttgcagacaattagaggtattagtgattactgtaagttcatgaacttacccgtggtaggtggtaaggtaagtctgtacaatgaaactatctctggtcccataaaaccctcacctgttataggaatacttgggttaattgattccaagaataagataaagtatccaaggtatacctcaaaccaatcaatctttatcgttggagccaccaaagatgaattgggtgggtcagaatattttgaatattgtttagatattgagggtggagacgttcctcatgttgatttagaggatcaaagaaatattatagagactatcaaaaaattgattaatgaagatctagtgaccggaatccatgattgctcaaaaggggggataattgttgcaatgttggagatggctctccatagcaacattggatttagagtttcagtcgacaaaatcccaaataaatgctctagaatcgattatttgctgttctcagaatctcataatcgatttattttttcaaccaatcatgactcaatgattattaaatacttaaaaaagaggagaattccatttgctagaattggaattgcttcaagtgataaaacttgcatttttgaaaatagtggaaaaccaattttcaagagttcactagagaccatttctcgaaattatcataactctttttcaaacctttttgcaaaatctatctaacttacttttttttgtctaacaaatctgatacaaatctcctcatcttacgcattctaaaaattaaatagaaagaatgacggagatatatcttctaatggttcatgaaaattgtggtgtggtaggcatattttctttgggaggagagaatataataccttatttgatagattgtcttcgatcactacagcatagaggacaagaatcatggggcattgcgataccaaagaaattaccttataaaaaaactggattggtttcggcctcggcaaatgaatttgataaattaattacaaagttttcttctaatatcgggataggccatgtcagatattctacatttggctcaagttctctagagaatgctcaaccattgaaggttagagatttatgcattgctcacaatgggaccattacaaacgctgaacagctttctacgatggttgggggctgtacttttaccccacaaaatatgactgacacactcgttgccgccaaaaggctagttagtattttaaaaaagaagaatgatatgaaggccgctatggcaatactcaaaaatgagatggtgggatcttattgttttacatttctaaccgattcaaatacaatatatgccgcaagagatcccaaaggcttcagaccactcgtattaggattgcataaggatacaaatacttacataattgcatcagaatcctgtgctctgtctactgttggtgcaatacttttgagagatattgaaccaggtgagttggtaagaatagacaagaatggtcttaaatccgaaagattttctgaatctgtgaatcatgcgcattgtgcatttgaattcacatactttgcacatccgagttcaattatggaagggataaatatttatcttgcgaggaaaaagattggagaatatttagcaattaaatttccgattaatgaggcagacgtggtaattccagtacctgattcttccagacctgcggccttaggatattcgctgaaacttggactaccatttgaagaaggtttgttaaaggacagatacagcaaaaagggctccatgaggagctttatcgagcccctagtaaaagacaggaaggaaattaaccaaaacatcatgccaatcagagagatgatagagaataaacacgtcataattgttgatgatagtatagtaaggggtacgagttccaaagcaataattgagtctgtcaaacaagcaggagcaaaaaaaatatctatggttgttacgtatccgccgattaggtatccatgttatgccggaattgattttccatctcaagaagaattgatcgcgtttcaggtcgctaagaatgaagtggatttggatattattggtaacaaagtcgctagaataataggggccgacgaggtttgttataacgataacgtaaatcttgcgaaaggaataggtttgaaaaagagtgaattatgcttctcttgttcatctggggattatacaccccttggaataaaacctaattttggttctcggtaccaaattaacgataagatatttgtagattagaatttaaatcccttctttctagtataatcatattgagtttagaagagctccgcgagaaggcattttttcaaaattcaatcgacgtatggataatgttgtgtgaggaaaagaaatgggattattctgatattaaaaattatctaaagttcatagattacttattttcaaatggaataaaaatacaacgctttccactttgtatcaaagagtcagggggaatgtttgaaagaggaaaagataagacaagctttttagagagactttcaaaagtacagtctgacaatgcatctgcatttaccataaaacttacacaatcagccattgccacaatgagaggatttgctttataatctttttgatgctagattttggtggtccaaaatgtagatttttggatcctccacgaataatagtcttttataattttaatattgttaatactttttttagcttcttcaatttgttcccggtccatccaaacatgttgatcagaacctgtattcatccccatctcaggaaaatttgtaataatacaaacaaaaacagattcaataatgtgcaaaccactttgattgtcgatatttgaatagatacctaaaatttcaatgggttctatgcgaagtgctgcttgctgcatgatggatctccgtaaagcatcctcagccaattcgccatatctgacaaattcaccagggagactcagggtgattgcatggttagtatcttggttcctaatgaaaagtatctcgttgcgactagtattgcatatagccgtgaccttgttgagaggatgtaggttgcagtctttatttatcatttgggaaatttctgaatgtggggaattaatcgggccagtttacatagcaaagtttgttttcaattccttctttgtaacgttatctacccataggaactttctctgaagggtactcgtatacattttggtccaatccaattcaacaatattcatccaagagcgaaacactctggggtctatataatttcgtaaagaagttcctaaattatattcccttgtctctttctgtaaccttacttggaattctagcttttgcaccctctctaccaatctcaatttctgattttctgttttccaattcttgtcctttaagtctgccttgaggctgttaataaggtctgttttctttttcatagactcttcatattttgcaattgccgtaatacttgcaggattttttggatctactcccttcttatgattacaagttattgcagcttgcagatttgcatatttggcaacataaagcttttcagattccgtagattcgggcttcactattattggtggacttttgagtgatttctttactatatttgtagcaataaaagttctaaaaacttttgcagtaagcccgggtacatttttagggtctatgtttctcagaaaagtatttactttcattgagtttatgttatcaaaaataggatctgtttccttcttgtttttaatgaaatgactcagattgttaaataaaagtaatttatcatcagaatcaaccaaaatagatttttgccaagggacgctgtcctttccaaggaaactaaactccaatactctatttttctcgtcgatctccttgaattttaagtgttcctttctgagggttgttgcacccaccgtgtctgcttcatcagggtctttttcatcaccaactctcatcgccatttttattatgagataacatacagtagaaattttcctctggtttcgatcttttgatgtcattttcttcacgatctcccgttcaatcttgtcaatatatttttcgaggttttgggccttatcgtatttggccttgtcataattctgacggatcaaagatgaatcatgtagccaaacatactttctttttccagttagcatctctatccaagatgctaaccaggtagaggtatgatcatgtattattttttgccatggtccttctggaacggctgcctcctcaccaagattgagaatgacgtcttcgggtttgacacgaggcttccatctaccccttaatggatgttgtcccctgcccataaataagcctggaggttcaactaaccaatttgccacttcgacctcaatatcgtccaccaccgcctttccaaaataatttcttagtttttccttctctttttttctctctaatgcgatcttttttctttcctctcgtgacagattaccccacgcgattttgtctttttccttagtagccttttcgctatctacaaaagtcataaattcgctcatgtctaactgatctatttcgtgaatactcttttggatatctttaggcagcaatttcttaaaatctgtcaaaaaattttgctggaagacaggatcttgcacatagtgagtgtctttcttctttgtccacgcatagattaattcttcttgatctttagttagtgtgtaattctgattatcgattttgaatggcaaattcttggctatgtattcgggcggaaagcatactccgttgtgatgaagcgtaacccatttttggttgctgctatttccacgattttgatcatatttatcatcagaagaaatcgaaatggaagacaattatataaaattattttgatttagaatataaaactattctccaagaaaactttcaccttatagtggaccatggacgtccataatttagatccaaagtacagtgctgattgcagatttattcttatttcatagctggactttaagagttatttgaccactttaacatcaagcggcattgtttttagttactttcaaaatttcgtaagtatacctgatttatttctgtaacaaactccaaactcggtaagtttttgaatttttttctcattgaaaatagttccgtctacacaaaccagcatgtcgtttatacaacaacttgaacaaattccaatcccacatttcatatatctttctatgcttgcctcgatgtgcacatgattctttattgcgagatcgtatgcctttttcatcatcatttcgggtccgcaagtataaatgatatcaatatcattgtgagttagaagaaaatctcttaaaatatcagtaggatatcccttcttgccataggaaccgtcttcagtcgatataagcaagtcaatattcttttcttcagcccatttagatattaattcagtaaaaaatagctcagatttagtcttagcgcctatgatgaacgtgaatctacattgatgtttcttaatgtaataaagtagccttacgagggggactaatccagtaccaccacctagaaaaataatattcttatgagttttgtcaaatgagaaagaattcccgtatggtccgcggattccaattctatctccagtacctttattaaacaatgaagtagaaccgaagccattctttctaattgtaattgcagcgtaatttttcttgttgcttatcattacacttagtgggagttcttctttcctaggtatccaaaccataaaaaactgtccaggtcttgatacgctccccagagagtctttaaagacaaatgtcttgacagtgggagactcgacgacaacgtcttcaattaataccgttctcatcaagtttttatctatgggcaattccaacaatctccctgatatcgattatattagcagcctctaagtaggagcgcagacccctaacaatcttcccaatcgaatttattcctttcaatcctatcacactacctatctgaattgccgaagctccagccatcatgtattctataacatcagtgtatgtcattatcccaccacatccaataatcggaattcttaaactcttactcaactcatatacgcaccgaacccctagaggccttatagcactcccagaaaggccaccgatcttattttccaagaccggacatcgagtttcaatgtctatcttcatagccctcagggtattaatagctgtaattccatctgcaccggcactttcagctgtcttagcaacttctatgatgtctgattttcctaaacctactttgacaaaaagaggctttaccgtatctttcttgattgatttgataatatcatagaccaaatcaagatcatcgccgatttccattcccattttttctacatgaggacaagacaaatttagttcgaaccccaaaattttaacattattaaactttttggcgatgatggggaattcactcttatcggacccgaccaaacttacaaatagtggtccagtattattagaaatttcctttgagaacgactctgcacccggatttgcaagtcctactgcattaatgtagctcatgttatttacgcttactatagtgggatttctgtaaccctcacgaggcaacaaactgatcgatttactaactatagccccagctccaatgttgtacaatcgatcaaaaatactttgagatagtcccaaaatacctgaggccacgatcactggattctttaaatttaagcctgcaatgctgattggtatatcataatccaattcgttataaaaaatcttgttttataattcttaaaagtctatcggaaattccaatctattaatgcgttagaaacaatgttacaagttagggtctcatataattaatctacaaaatacacatcaataattaatcattaacgggatatacttgaaaattgagcacatatccattggtctccaattactcagagtttctttaaaggataggcaccttattccccagatcagatgttaaatactgttaacttattaactaatctcctttcaatcaagaatacatcgcatcgttaattattatagttagaatggaaacaatcaacttttgccaacaattagacattttcgattatattttgcggagatcaaattacaaatttaaaacgattttatccagcaatgttgtaaagatacatcctctgttttattttccattagaggactgaattttacttactcattttccacttgctttacatttctaatccgtaattctagggcatactaaaccaacttcgaattccagattctggttagtttaaaatcttaaaaccagcaaaatggaaggttaatatttctagcacctatactgttaaatccacgttaatcagacagctctaccgacttttgacttcagtgctacctattatatttataaaatagatgtatccttgctgcaaatgttgcaatttactgtttttcattctgcaaggataataattgtcaaatcctttgattgtatcatttgaacatagagtagacttcttaatcaggcctatctaaaaggaggaattgatattgtgttttagatttaggaacttccagattcaaggatttcaagtatcccactagccaaagatactgaatgctttcaaagtacctttgttaggcacaagttgaatcttcgatggattttgatagttctttctttggatagggatgatacaagatatgtttattgcctcctcaattgaaaccctaatccacagtcatattcatccaaaaacaatgattcattaattatgcattcaggtattctcattcttttcttaataattctcttggatttgtatttttcttttatcctattgcatacaaagctctcatatactgcttttcccttacttttttattatacatcaatcaagaaatattgattttcgagttcagtcacaaaatcttaaagatttatttctttcgtaatccctggtcaaggacaatatttatacgagcttcgggtaggacgagaagaaagtcaagtcatctaggatagatgatctggtcaggttgaatgcaattaagccacgttatgtatatgagaaaaggtttaaaagaaatcagtctaacatatcttatgagacaagaacacgctacagtgtatgatgtacagatttcagaactttatgatcgtataaaaggacatttaaacagtcttaaatttgaaataatttatgaagaaaaagacctagaaaaagaccaagaatatttggatctcaaggcgcacaagggtggtaaagctagtgttatagttgggaatgttcgggaagtagaggtaatgatgactggcacaaagggtgctattccttcctacgatataattcttcgaactggagcgtggggtaaagatattgtggtccctgctgttatagctggtgccctaacagctggaatagccgctgttcctgtggcagctattgaggcatatcgagcacattcgtttgagaaaaagttctgggaattcattacttcaacattatctgaaattggggatgggaaggcgagtatatctagcgtcgttaccatgactccataagtgagagattccagaatattagacgagcctgattaagaagtctactctatgttcaaatgatacaatcaaaggatttgacaattattatccttgcagaatgaaaaacagtaaattgcaacatttgcagcaaggatacatctattttataaatataataggtagcactgaagtcaaaagtcggtagagctcatcgaagatattatttattattcaacagaggaaaggctgcaatcgcaacaaattgtcaaatatacgtattgacataagtttatgaccagagtcggtaatcagaaccgattgacttcatttaattcgatcgagagcaattttcatcctttgtctcaagaaccaaaccattatagcgataaagggtaaagttgctgctccatatgcaaactcagtctgcaatttggaattcattgataaacccaaacccaaaaacatggctaacatcacacagatgatacctatagtaacatactccttggtaacaaggagaaatttttctacatcaaatttaggataatgaatcaagtgatgaaaaacaggcataacaaacatgactgttgccgcagctactgcgtatagagccgctaagagaatcaagttgttaaacaataagaagtaagatggaggatttacggcgatattcaacagaaaaccaaagaaaattgatgatgcagccgctagtatttgagaccaacgcatacctgcaccaactctatcgtagtcttccgtagaagtaccctctaaaataacagtaggtgaatatctataaaatcgtgcaaaaataatgataaaaggcaatgaagccaagccatatgcaaactcagtctgcaatttggaattcattgataaacccaaacccaaatacatggcaagcattatacatatgatacctatcagagtgtatttctttgcagctaaaagatatttatccacatctaacttacgatagtgcatcatatgataaacaacaggcattatgaacatggcagttgctgttgttactgcgtaaagtgccgctaagagaattatgttgtcaaataactggaagtaagacggaggatttactgcaatcttcaacagaaaaccaaagaaaattgacgatgcagccgctagtatttgggaccatcgtaaagatgctccaacccggtcatatttctcagaagaagatctttttatcggatcatcatctggaagtgaagacataagtttacattttgctttcaataaggtaattatataaactataccatttgctgtgatactgtgatgatcttaagataattacaccaaacaaattagtacgattatgttttgcatttgtagtaaatcgtatatgattgaatagagtagtagttaccccacccctcctagaatagatcttgagaaacattcagtgactaatttggcgtcatacagacctttctcgcagctagagcggagctcagtgccaaccctataatccacaagtacaatgtcaccaatcactgtgcagctctctttcggatttttttctatgatatcataagatattgttgatcagatgagttgccctcaaaacatgctgttatagaggtaaagactaaactcgaatctttttaagtgaaagtatcatatcatatcaataagcctactttcgtaaagagcaaacttattttatggctttagccttgaggaacaaaaagaaaacgaagataaaaggcagtgaagccaagccatatgcaaactcagtctgcaatttggaattcattgataaacccaaacccaaatacatggcaagcattatacatatgatacctatcagagtgtatttctttgcagctaaaagatatttatccacatctaacttacgatagtgcatcatatgataaacaacaggcattatgaacatggcagttgctgttgttactgcgtaaagtgccgctaagagaattatgttgtcaaataactggaagtaagacggaggatttactgtgatatctaagaaaaacccaaagaaaattgaagaggaggcgcccaatactatagcccagtccatacatgatccaactctagaatagtgctcggtagagctactctttacaggatcgtcgtctggttcaaatggcattagtggaattacttagacttgctgcactatttaaagaggatggtgaccctttgtacaaaggtatcacgagaaataagtgggacctaacgtttgaggatggatgttctaaacaatccagcttcggagcacatggatttagcaacagaggcaataagaatgagagcgggattcatattttgtaatattgtcttttctaaaatcacttgactttttcttgtcaattacaaaaacattcatacctaaggaatcttcaaaggcaaatagaaaatctaggatataagaatatgataaacgtaacttatttcggatattaggggcaatattaaaaatcccatgctccatcactattctgtccattagaaagaatttgaattggtgtttgagcgttaaatggacgtacagaaaaaaaatatattatccaattaggatcaatttatcctactatttctcattttaaaagatcaacaatattttgatatattaaatcctctacgaaatctttttttctaaattttttaaaagtttgttcatggatctccttacaagccaatccacattaactaggtatagctcgtaattaaaaagactatctggatgggttagaatatattatacgtacattttatttgatttgcttatacatatcagagctgggcttgccggggtagctcagcctggtcagagcgttcgactcataatcgaaaggtcgcgggctcaaatcccgcctccggcactttttttggattttctatgcttaattgtgtaaaatctattaaagatcatgcaatatttatcaataatgcagtatcttagcaatatttaaattaaccttggcataaataccacttgatttgcaaaaatcaaaaaaacctagaaagatttcccgaaatagattaatattatctctggtttataaataatgatcctcaaatcgaattattaatctatgtgatttttttgatgatgatcaataatttactctggcttacaaacctgcgggagtgttaggattatgtatttttgcgaatcaaacgttggttgaaacttttccaatcagtataactattaccaccatcccattgttcataatttatgactttttctagatcgagtctgcttagccagttttgagattgtaaatctggttcgccttcaaatttttttacatatccaaggcaaagatatgctatcggtttaaccgtagaagggagttttagaattcttttgagatctttattgttgatgatgctgacccagccaacacctatgttttcagctcgtgcagcaagccataaattttggatagcacagcaaacactataaaccccagcttctcttatagtcattctccctattacataaggtccaaaccgtttatgatcataagtaacgcaaatatttagattagattctaaaattccttctaattttaaatctagatacttccttttcctttctttatcttttgcaagtaaatcaattgattttaatctctctttggagaatgattctttgatatttagacgactgtttctgtctcgtattaagataaaattccatggttgtgaaaagccgactgacggagcatggtgagcggctgtcaaaatcctcaataaaaccctattgctaattttctttctaataaagttccttcttacgtcccgacgggagagaattattttgtaaaaaatctccttttcaatttcagtaaattgccccatcatattacctgtcaatatctaataactaaaatgaccatcttttaatatagatttaaccttctatctaacagattcattagaaatgtaataattattctcagaattctttgacaggacatgacaattataatggattacatttgaaatttggttttaggtcgactaccccaaaataggcaaaaaggattgtcagagcactgagtctgttttttaaacattctccaatttttttgcatttgaatttccaaattcatactccgttaatgaatttgatttaatttaaagacgaggatttagcgacgaagtaatttaccataccaaataggatataagatgatataaagtggaatctaaaatggacgtactgtttatacttagcaaactatttaatccgacttgatcttatgattgagtaacttgtccgaaggtatctttgtaactgggactgatactggaattggaaaaacattgataactgcctctctagcatggaaattctccaagattattactaaaatttgtgttatgaaaccatttgctacaggaatttcagagtattcaaaaaagttcagatctaaagacctcgctatcttggcaagggcaattaaattcgaggaaaaacaagagaatttgaacccgtatttttaccctctagcttgttcgccgcatatggccagctccttgttaaatttaccacctccatcattaagatatgcgatcaagaaatacaaattattgcagaaaaaatatgactacctcttagttgaggggataggtggaataatggtgccattaaacaacaagcatacattactaaactttatcaagatgacgaagcttggggttataattgttgcaactccgaaactaggaacatttaatcatatactgcttaatgtaaaaatttgtcaatcaagtggtatacctataaaaggaatattagtaaataaaatgcccaatcatccaagccaaattgaagccgaaattcctacatttatccgagaatatacaaaattacctatattgggtgtaattccgattatgaataatctcaaaatgaatgaatcgacattttccaaaatctcaaaactaatagatatttccccttcgatttaacctatcttttattagtcgacaggtagttagttgctaaatgattgtaccattctgcctctcatgtacggtttcaagaattattcttgaaaaaactacccttagtttatcatccatatatcgatcatttaacaccgacgggacagtattatcccttcctaggattgaaccgaaccgcaattgcaaataccatcccttaggtacaaaacttgttttagatgattatatcttgcctaattttttaacatacaatttataggcttctaaatatgatttcttatctccaatatccataaaactccgctcctctactatgaacgactttactttcttttttgatcttattgattctcttaccgcctcgtccattccaaaggaggtagaaattggaatcaaatctaagaattccggttcgaaaacatagcatcctatgtttatcaatccagaaatttctggtttctccttccactcagatacaagcattttttcatcattactaagctcaatgaatccatatttgagattggttttgtaccttgaaagagccatagagataaaggctttatcttcaagatgattttcaatcatcttgtcaagcgggaattcatacactgaatcaccatatagacaaacaaacggttcttttaaatgagtagcagcggttttcaattgtccagcagtggctaacggtctatctgatctggaatattttatctttatcccgaacctcgtgccgtcttcaaagtagtcttctattgatctatgcaaataactcacacaaataattatctcatttatctttttagaattgataagccattcaaccaaatactcaagtaagggtttattgcccagcggcaacattggctttggaataaagaatgtatagggttgcagccttgttcccagaccaccagctagtattactgctttcacaaaaaataagaataattaatcattatttataatattacttattaacatagttctgcagaataatacttattttttctaaaacttcctttggattttgtccaaacataataaccataggctcctttccataatcgccatcgtgataaactaactccgcatctggttcttgtttaaatgcttcagtaattccccattgtatcgaagaaccttctactctcttactctcttccgtttccttacttctagaataattagagcacttgaaattatttttgcaaatcttaatgatccttggattgttccgaatattaatggcggacctaaataatgagttgaatttggctgctgccaagagtgcattagatacatgcagagatgttccgaattgtatgacatttggagctctaatattgattcccagattagttactctgcccaacactccagctatatcatcgaaatttttgggtttctcaattgaatacacaaagtttgttttggtttctggtataagttcaaaaaaattaggcattctttccaaaattgatacagagtcttgcaattctattaaaactttgaacttctcagaattgtcatacatgcgatctagaggattggagacgaataccccatcaccgatttgattggagttttttaacgcttcgtatacatacgaatttgataatttgaatgaatcaccaatattataccctttggctaaaaaggaagcgacagcagcagaaaagttacatccggtgccatgagtttccccaatcttcaacctttcgtgtacgatttgttgtggttcaaggtttttatctgtaaataataagtcaattacctttgtatctttgttcgtaacatgaccacctttgataataatatttgaagctcctaacttgaaaatctctaatgcagctttagtcatatcttgcctgtttgatatcttaacttttgaaaggaattcagcctctttaagattaggcgtgattacatgtgctaatggaatgatccccctcttaaactgctcaaatgactgctcgtctaataatttgattccagtcccagaatagaggactgggtcaagtacaatcggagtcttatagttctttaaaatacttttgacaatatttattattgacttactgtaaagaactcctatttttatgacgtctgggttaatatcttccaatgtagtaactatttgatttttaaaaaattttggcggaactaccagaatatcagagattgtcttagtattctgagcagttaaagtggttattattgttgttccgtatacacccaaggccgaaaatgtctttatgtcagcctgtatgccggcgccagcagatgaatcactacctgctatcgtcattacctttttcaatcgttcaatacctccttttgtgttggtgtaagatctaaattaatgtcacttgatagcacggatggtaattcatacttttataatgatgtaaaaatctgagaaccaataattgctttgattttacagacaactttgaaagatgaaaggaatggttcgaatgggaagattccaatataaactagatttattatcacctaatctcacaatatcgatcatatgactatcaaatcacaatatcataaagaaaatccaaaggacaacaagcatatgatcataactgttaaatatgcatttcaagtcaatttttctgattattattgagtaagcctatggaccttggtagtttgaaggttggttcttatatcatcatagacggagaaccttgtagaattgtttcttatgatcatagtaagccaggtaaacatggttccgcaaaagcaagagtggcagcaatgggtgttttcgacggttcaaggcacagtttagttgctccggtttcggcaaatgttgaagttccacttatagacaagaggagtggacaactcatctcggtggctggtcaagtattgcagattatggatcttgaaacattcgaagtttttgaaacttctgctattgaggatgaaattagagataaactcaaccaaggcggcgaagttgagtattggaaagtattggaacggataaagattgtccgagtaaaaggataatacatatactgtataaatctaattaggtgccgcattcaattctattcttccgtctgaagtaagaatattatcttgtaggcgtaaaagtaaatcatttgatcagtccaaaaaggtcaaaatatggcaagcctttattaaattgggtattcatctaactcgagtattatgaaaaacatcataaagtatgttatgatgcatttaaataataataatgttcacattacttaattggaacagcaatcaaaaataaagtttgatcttcatttaccacttatattaattcatacaccgtacggattaaaattctttgataaggtttcacagacgagtgctgcaaggttttatgcaaaattcaatacttatttaatgccacttataacaattatggctttatttctaataataggctcggttgctgccctattttctagcgaaacaataagagaaggagctcgtggagtaggtcctcaggccaatttgttaatacctggtctcaacccttatttgccaatatgggaagggtgggtggctttggtagttactatcatagttcatgaggctggccatggaataattgctagagtgtatggtgttaaggttgaatctaccggactagtattgtttttagggataccgattggggcatttgtgaatattgaaagagacgaacttaataggatttcaactaagcagaaaagttccatattgactgcaggccctatgacaaatatagtatttgctgctatctctttatttgttatacttttgataacttccactttggtaataactaagcctatggatccagcatcctatggggtagtaataacaaatgtaaatcaaggttctctcgctgaatctataggccttgataaggggactacaatacaacaaattcagaacaacccgattcgaaatccggtggaactaaatgataacttaaacgccaatttaggaaaattagttacgatcggaattgcagatgaaaatggagtgaaatcaactaagcaggcaactctccccccacaaagggagcctggaaagggaatcttaggagtatccatcacaccagtagcggacccaaaagaggtattggatcgatacaattcaatgatttatacatcaccattaggtttgcttgctccaccgacatttgtacaaggtatggtaccttattctgactttatggccgacaaatacacatctcccatatttggttcatattacactatacctgctagcctatttttctggctttggttcataaatttcaacgtagcaatttttaacgcattgccaattggccctctggatggaggtcagctatataatacattgatagataagaaaactcaaaacaaaaagggaattattaaacatgcatcgaaaatactaacatacggaatggtattgattgtggtcctctccatcgcactaccttacatattgaaataaagagaaactatcatttgattgaacgactgtatgaattattagtcaaattggaattgatcaataattcaaaggtcatgagatcaaacttaatttattttatgatttcttttttcttaaaggaatgattaatttcttaacataccttgtagatttcgcattatcgctttttctggatgctgctaatatagcatactcatatctgcaggcaactaactgttatgaataggatatttcacttgggtaatttatgcagatttagacaaacatctataatagaatgcaaaaaaataagatcattgaaaacttcccttttaaattttaaattttttttttgtattaatcatgtcgaaaaaaaatatcccttgtatttacaaagttatataatcgatcctttggatgagaatgagtgctttgaaggattccttatatgtccagagtgtaaaaaaaaatttcccataataaatggaattgcaataataatgagcgatatcgtaaaatatgcctcaaaacgagtatcaacttttggtaaatggttttcaaatgctaaaagcgcagagatgaagatttttttaaaaaatttatcgttggatatcgacaaaaatcatcaaaaagaagaccgatatgaggaagacggtttatattttcagagttataaatggcttcacaatgaaaattttgaaagtgataaatttctccttcttatgagatggaaaataaaaccatctgacgtttatcgaaaactgacttcaaatattcctttcaatcctgagggaattgccttagacttaggatgtgccctaggattatccacgatggaattagcaaaaaaattttcatttgtctttggaatagattcatcattttctttcattcgggaagcaaagaaaaagactaaagaacaaggagtaaccaatatggagttcatagtatccgatattttggatttacctttcagaaatcaaatctttgatctgatttttgggttgaatattgtcgagttcatgcctgttgacgacctcttgcccaagatacatcatctcttaaagccgcattctctgtttattacaaccacgccttacgattacaatcgagagatagtttacaatagaaatatgaatgacgagatattgcgttcaaccttggaaaaaaaaggtttcgaagttacccccaggacaaagaaagaggcatttattccgtggattctaaaagttaatgagaggacttacttgttttacttccttgatctcattgaagcaagaaaaatatcgaaacataagtattaaatttatatcaaattcttccgtatcagttaactgctattatttccgcagtaaaaacttataaaacttgttccaaaatctaattatattaatttacaaaagagatagcaggtataatgaaaatagtatttttgcaatcctcatccacttcctattcattcttagattataacgaaagtgaagttgatagttctatcccatcaaattgttctttatacctttttggaagagcactgatcacaaggaacgtagaattaattaattctttgtatgatttagaaactgtattcgttcccaaaaaactaaattttatttcaagcatcataaaaactaccacagatataccagtaaaggaaattgatgaaaatacttacggtaagttaataaaaagggaattaagtgttcctaatgaattcgaagtcacggagaaaaacaacaatggaaactccaacaatcatattcaacaaaatacactcattacaaacaacaacttgttgtttctcccatgtaatacagtcataggaaagaggtctactagaaaaagtattgaatattacaaatttcagtacccgtgggaatttttagatattatacaggaactcctaaaaaacgaggtaacattttccattatttccaataaagcaacaatcgcaaaaactgcgattattgaaggtccatgtatcatagaagacaatgttgtaatagatgatttcgcaaagattaagggaccgtcttatatcggtaatggtagctttatcggcatgggatcgttaatccgcaatagtatgcttgattacaatacaaatattggctttaattgtgaaatcggtaagacttactttgcaggtaatgcaaaaatttcccatcataatgtaattttggatagtatagtaggaaagaacgtttggtttggcggttactcaggaactgcgaacgttttacttaccagaaaaaatgtccagtacagaatcaataacgaattaatagatacggggagaaatcattttggtgcagtaatttctaataatagttctataggggcatcagtaataatcctccctggtcgcaagatcccaccagattcgattataccggctgggactattttttcaaaatagttgttttatttagatgatgtaaaatatctttttttatcatgatgttttgtttgttacttctttgaatgatttgaaagacattgcctcatcctttagtgattcagatagaaaattagtggaaatttcatttagagattcattaccggttaataaataatccttaaagtattggtaactcttgatttcgttattatatgagcttaccagactgttttttgcggcctcaaaggctgcgggcgattccgtttgattaaattcattcatctgtttagtaaaatttgtcaagtaggtattggtcaattcggccatcgttttatttgataccgtccccaattgccaaagagctatttcatcttgaaaagccctggttagattcgcagaactttgggtgaaggtggcaaaatagtttgcatagtcattctgggtagtttgaactgatgccacatttacatagaataacaaaataatagcgactgaggataaagaaatcaagaatatagtctttattctattggatttgttcatacaatcaaatagaataacttagttaaaaattcttgcgcaaaagtcttctattctaatgcattctaatcaaatttgaaaatttcaaatccttatttttggacatcaattgatcgcttcttccacaaagtaaatcccttatgatctatcagctcgatattaaatctatctgcaagttttaatcttattttatcagattccttatagtttttctcagagcggaacatgtttcttttgtatatctgctcctctatctcttcaaactcctgcttagatacatgcgagacttttaatccaattacaaacatgaatttttttaacaagccaaaggtctttgttaagaattcaatatttaccggagtatcaatagataaaaaattattgatccttgtaatgaatttcaaaaatacagtcaatgcatttgcaaaattcaaatcattattgagatgttcttcaaacaaagttagatattttgtcagctcttctaacagcggttgctgaatggaatcagaattctcataaatgaatgagtttctggttcggtattctagttcataataggcattagaaatttggctccatttacgtattgattcatcaattatatcctttgtataatctagcggttttgtataatgagaagaaaggcaaaaaagcctaattacatttggaccaacttcctttaataattctgaaatcttgatcatatttccaatagatttcgacattttttcagagttaatagttaccatcccgacatgcatccataatttcgagaattcggtttcgaataatccctcagactgtgcaatttcattttcgtgatgaggaaaaactagatcctggcctcctccgtgtatatcaatatttgctcctagatattttgaagccatgactgaacactcaatgtgccatcctggccttccatttccccacggactggcccaggttggtttcacggaactaaatttccacatggcaaagtctcgcgggtcgtctttattctcatcaacttcaattctagcaccagaaattattgaacctaggtcctttttggacagcttgccatatcctaggtaggacctaaccctaaagtaaattccatttaatcccaaataagctttatttttctcaattagtttgctaataaagtcaataatgtctgggatatgctctgttactctggggtatgatgtggctctcaatacgtttagggcgtcaaaatctctaaagtaactctctgtatatactcgagaaatatattcagcatccgtatgttcactgatagccctagctattatcttatcatctatatcagtaaaattttgtatgaatatcaccttaacaccttgaatttctaagtaccgtcttaatacatcgaaaactattatggtccttgcatgcccgatatggcagtcatcataaacggtgacaccgcacaagtaaattttaattactttatcgattgtattaatttcttccaattggtttgttaatgtattacttaatttcatttctaaaaagaatcttgtaaaaaaattaaacgtctagataaatttcattttttctaatctgaacggggaatgtggtcaacttaacaccctccatataatctagtaactcaccggttctaatattgtaatgccaaaagtgcaaaggacactcgacaatttcaccattaacttttccaggtgccaaagaaccatcctgatgtctgcaaagtgcttcgatggcgtaatacttgctttttgatacaaatagagctattctttgcccattaatgttaagttccttaccactgccttcttgaatgtcgtctttactggctaccttaatccatgtcatctaacaatgcataatactttattaaaaataataaatgtttttttaatttatttgattcatatacagttaaattaaattcaacaactaaaagtatacaagttaggcgcaaatgaacagtctgtccgaaaacacaaagcatacctcgattactactcgtccagattcttatacttcacatattaaaacatcagaaaatcataacgagatagcagtgaatgaaaaatacaaagggccaaagattttgatagaaaaggatcttgtagtcacatccgccttgccttatgcgaatggccaaattcatttgggacatattgcatcgacttatttgccagccgatattttcactagattcgttagattgactggtagtaaggtttaccacatatgtgctactgatgattacggaactcctattcttataaaatccgagaaggagcgaaaaacacctgaagagtatgtgagagaatggaatgagagggataaaaaagattttgattctattgacattaattttgatcatttttcaaaaactagctcccctcaaaacttaaagttcgtgcaggacgttttcatggacctatataaaaataatcacataaaagaggagattgtagttcagttgttttgcacatttgataacaaatacttgcccgataggtacgtaataggtagatgccccttctgtaactcagataaccaatattctgatctttgcgaatcgtgtggtagagtccctgaacatatactggaccccaagtgtgttctgtgtggaaggccccctgtaaagaaagagagtctccattatttttttcgattatccaattttgaggaagctcttagaatttggctttccaataataagaatttacaagaagacgtagtaaaatatgtcttgaactggataaatacaggattgcaagattgggatatcacgagagatttgtcttggggggtacccataccaaagattcatggagttccaaattacgaagataaagtattttatgggtggtttgacaaccatttgtgttacatttcatcttttaatagttttgctgagaccgtacttaagaaagacggtaggaaactttggaacgattctgaaatcattcattttattgggaaagatataatctatcaccattacctctttctccccgcgatcaggcttgggatcaagagcgaatataaattacctgataggatagttacaagaggtcatttactattccaaaacagaaagttatcgaagagtaagaattggtcgataacattgggaggattcaccaagtcatttaaccccgattatcttagattttatttttctacaattatcccatattcacaatcagacattaattttgattgggatagcttttatgaaaaaattaataatgaacttatttcaaatatagggaactttatcaaccggacactctcctttactcagaagcaatttgctggaaagatcccagcaggaacgaatttggatagcctagacaaacaggcattgtttgagatcaagcaaatcgcatatgctgtaggcgaattgatttttggaaacgaaatagataaggccatgaagaggattttgcagtttagtacattttttaatcagtatttccagtctaaagaaccttggaaatcacatcatgattctaataacaccatttggatatctgccaatgcagtgagatcacttgcaatattgttgtttccgtttattcccacatccgctcagaaaatctggaaacaattaggaattatcgaaaatttaacgacccaagactggtattcagcatctgaattgagacttgttcaaggacacaatatcgataacaatataattccgatttttaggaagattgaaaaagccgaaattgaaaatcaaaaggctgagtttttagatactaaatcaacaaatactgaaccttgataagaatattatatattgtttgttttctagagtaatgtgaagacaagcttatggcagccgtaatgatagggcgatatcaaccattccatttaggacatttggaactagtccgtcaagtattggatgaaaatgatgaaataattatcctaataggaagctcgcaggctaatttcactctaaagaaccccttcactgctggagaaaggatatggatgattagagatagcctcatagaatcaaaaattaacttgtcaagagtattcctgattaatgttaccgatgatgaaaacaatgtgaaatggtttagcaatattaaatcagtgagtccaccgtttaatgttctttatactggaaacgattttgtcagaactttgcttaaaagagaaaccataatcataaaaaaaccaaaattaattgaaggaaatttattaaaaggttcagttattcggaaattgattcttgaggacaatactaaatggcaagagttggtctccaaatcggtaataaaaatctttaaagaaattgatgcagtagagcgaattagaaatatttatcatacttggatggattctcctttctctgaaccgaagaaataagaagaatgaattatcattaaggttatatctgttcccatcatttcttcacttaaatacataatcaaaaaacaggaccgtttcgagacaccgtctaatgtaatacatgactagatatatttatttgaaaagattttagattgttcgatacttccgaagaaaggctgaggagattattacataacaatatctaattgccttgtttctgaaatgaaagataacccttattatcattaaggtgatatggacataaaatcggataggaaccatagttgtcttagacagtaactttgcacttataattttgttaattatgatactttttcagggaatggatcaaccgattgcgatgaatttactagattcctaatcgtctttcatagctattatttctatcctctttgattttagtcgatccttagggctgatgcttatctaattattcttatagtctatgaattaaattatgactaaaagaataggaaaaatcaacacggttttagcataacgagattgaaccaattgttgttatcagagaaaatcttctcaagcgaaaagcccgatctaatcactaattcttgtattttctcctcactatatttgtatgagctttcggtgtgaatagtttcatcctgagatatctgaaatactctttcagatcccgatattctaacttcttgatccgatctagatttgagatgcatttcgatacgatcctttttcttattaaaaaacgcataatgcacatattcgtgaagatcaaaattacatcccagctctctattcatccgggttaacaaattcaaattaaattgagcagtgaatcctgctttgtcattataagcgcgttcaataagtaattcatcttttatcatatcgaaaccaacaagaagaaagtccttatcattcatattaattcgaactgcttttaaaaagtccctagcttcatcaatttcaaaatttcctatactagatccaaagaaaactattagtctagaaaatgaatcaaatttaaaattattctcaaataagatattattacaatctttgataccatttatataatcatttggaatccctttgaccattatattctgattccgtgtttccaaatcagtcactacagaatccaaaaaattgaaggaaatatcaattggaaagtaatataatttatcttgtcttttcaatattgagttgaacaaatgtttagtcttttttgaactaccacttcccatctcgattaggataatctcttttggaatatcttgtaagatcttggtagaatattcttctagtatactgttttcagttctagttggataatactcaggttgaacggttatttgttcaaacaagaaggaacctttaatatcatataaatatttagaaggtattgatttctgaacgggattagacagtcctttcaagatatcggttctaaattcttcgttgttaacatccaaatgcaaattttactttatgtttaggactaagatataaatatttttgttatcatcgactataatacaaacggatccggactttagcatatgtctcatttccatcccatcgctaactttttttaaacctaaagctactcaatttgatcaattcattatatgatccgaatctctcagggttgatcttgtctaaagaattttctgactcgatttcctcattagtcttgaaatctttgataatttcatattttgatgttctctgtgctggtatcttgcctgccgctttgatgatcttacgcatatccactggcctcataaattgtccatactgcgatcctgcagaagttgatatactctcattaattaaacaaccaccaaggtcatttgccccagcaccaagcaatatttgggataattttggtccctccttaacccatgatacctgaagattattaatgaaattattgaagaaaattcgtgagatcgcatgtattttcaaaatttctagaccgtcagcaccgggccttatatctttgactaaatgatgagttgacatcggagcatcataatggacataacttaaaggaacaaattctgtgaatttaccggtttttttttgaatatttcttattatctctaaatgagtaacaatatctctattactctcaatatggccatacattattgtggaagtggttgggatgtccaaattatgtgcggtagaaattatgtcaatccattgttctatattgattcggcctggagaaatcttgttccgtacctcttttacaagaatctcagcagaggtcccaggtaagctcccgagacctgcctcctttaacatctttaaataatcatgaattttagtgttagacaatgtagatccatacaaaatttcctctggcgagaaagcatgaatgtgaatctcaggcaattccttctttattgctttgcatatattgacgtaaaagaacccatccattttagggggcaatccagcctggatacatatttcagtggctccaaactgccacgcttctttagccctccttactatctcttcaataggtaaaagataaccctcttccactctaaaatctctgctaaacgcgcaaaagccacattgctttatgcaaacatttgtaaagttaatatttctgtttatcacgtaggtcacaatttcgccttttacccgccttcttagctcgtcagcaaccaaagttattactgacaaacttggtcctgtggcttcgaaaagctttaaagcatcgactgatgagatttctttcccatctaaagccctcccaagaatcgaagagatttccgaatcgatatttctaaaaacattctcaagattcattattaatatactcctctctgaccaagccgtatttatctatcaatggttctatatagtctttaaggtctttgtgcacgaatttccttgacaacgccgaattaattatatattttggatacaccggcaagcgtgccctcaatgtaaatcctttttctcttgttactgcattaatattttcaatggtcggccagggtgattctggattgacgtgatctggtgtaatcggtgagatgcctccccaatcattgattccagaatcaatgtaatttgaatatacattagggcttaggttcggtgggacctgaagactaatatcttccaaaattattcgtgctgctgcgatgcatcttaaaaagtaaggatatgaaggagattttgcatattccattagtgtccccttctttggtaaaaaattttgcataattacctcttgaatgtgaccaaatttcctatttatattctttattagtaacaaagattcaactatttcattgaaactttcatctataccgattaagagtcctgtagtaattggaaaattaaactcaccagctgaaattagggattttaatctcactttgggatttttgcttggagctttttcatgagccttccctttatcagtcaatcgttcgctcgaagtctctagcatcatacccaaacttgcattactagattttaacatggacatttctttcttagtcaggcttccagcattcgtatgaggtaacattccagtttgtgagattattttctcacttaaatctgccaacaactcggatagattccgatgtccaagtaacgcaagccacctcttggcctctttatatttaatctctggcctctcaccggttacgatcaatgcctccgtgcatcttgccttttttccaagttcagcaattgcaattgcttgagacggactaagcattacagcatccatgtttgttggttcttttttgtacgtacaatatgagcatgaatctttacacagatttattaaattgataaaaacctttcttgaatatgtgataaatttgctacctgtcctattacgaagaaatgtggcaaaaaggttaagatcttttatctcagcattaattagtaaatccttaagatcatgactgtcaaccgattttttttcaattatcttataaatgatttcgttggaatcgaattttttcgataaatattgatagttttggattccatttacagtcatttatttttaatgaattacataatgaatctatacattaaagccttactatgataaaattcacgctgatatttctactaaataataacctacagcatcaaaaatcgtacaacatggatataaaatattttaagctcgggatatatgttattatggtatatgaccacttcgttgataaaggagagctcagagaaggataattcaaaaaacctgtctcaaaagaaaatcaggattttggttacaaagttgggtttggatggtcacgatcgaggggctttggttatttgtagagccctcagggattctgggatggaggtaatttattccggattattctgtacacccgaacaagttgtaaaaactgcgattgaagaggatgtggatgttattgcaatgagtttacttaacggcgctcacttaacactattccctaaagtgtctcgattgctaagagaacaaaacgttcacgacatattattggtgggaggaggagtaatacctgaatcagataagacccaattggagaaggcaggtattacagggaattttggaccaggcacatcccttgaaaaaattattgaacatattaaaaaaaatgtaaaaaggaattgatttatttgtaattcatttgatgagcttagactgttactccaccttttcttgcggccacatcatcctccttaggtccttccctactctttcaatttcatggttctccaactccttcagcatcatgctaaaggccgattttttatcctttttgtagttgctaacccattcatttgcaaattgtcctgattgaatctctgataatacatctttcatttttgattttgagtctccgtcaatgacacgtttacccctagtaagcccaccatatcttgccgtttcactaactctattgtacatgccagtaatcccatacttttgaattaaatctacaattaattttagttcatgcaagcattcgaaataggctatttctggctggtaacctgcttctactagtgtttcaaatgacttgaggatcatctgatggaccccgccgcacagatctacttgttctccaaaccaatccgtttctacttcttctttaaatgtggtttctaaaactcctggctttgtgctcccaattgatttagctaaagcaagtgttttttcccaagctttttttgtataatcttgatgcacagcaacgagtgagggtgtcccaaacccatctaaatacaattcgcgtactctttgacctggtccttttggtgcaaccattatgacatcaatatttttaggaggatcgatccatttccaatgtatagccgcgccatgtgaaaaactgatcgtcttgttttctgtcaaatggggagcgatttcgctcttaaaagtttcctcttgttccatatctggaattaatatatgaataacatcggattctttgaccgcatcactaacgctttttacgttgtgattatcattttgagcttttgcccatgtattcccgtttgggcgtaacccaacacaaacattcagacctgaatctttcatattagaagcctgtgctgcgccttgaatcccgtaaccaatgactgcgatctttagattttttaatggatccaaagagacttcattgtcaagccatctccttattgtcatgatttaaaatgaaaatgaaatcatatatgttcttattgatccaactttatccgttaaataatttaattatttaaaaaccggtaaagcaaatcataagaataactaatatcgatttgattcttgatatttttttttgtattaataacaaggttttgtaagtatttctcgtctttttgttctactttctttgccaccctgtcgtaaatcttaccgtacttcttaattagttcgattgatttgtcgcttcctagaaatagattcaagaaaagtggtgcgtcgtccgttaatatactctcactcagtaacgattgaattctataagagctacccgataattgctttaataattttaacaaatctttttcgtttttcagtgtcttgttagttgaaatttcaatcaaaagttttgagaaaacaagattaataaagtaaattaaactaataaggacagcgacgagaatatcgtgcttttctggtgtatcaatcaagaactttttgaattttggaaataacctacgcaagattcttgattctctgctgataccagataaactaagtggcacatgcattattatgttctttgaagaactaacttgagcccctggtccaaacattggatggatacaaagaaattttaaagagctgtatttttgtgaggtgtttgatatataatcataaattggattttttacagaggatatttcaatggtggttgttcctggtctaaactttatcgtatatgtatcaaggatcttaagtgtttcctttataggagtgcacaaaatgataatgtttgaatcttcaacaaattttgtgatacttttggaagtatacacattcaggtcttttgagatatcaatgtattcaaccttgttgggatcaactagaaagatcttttctaccttgatcgtttttttgattaagtctcgatcttcagattgctccttacgtaaattaataaaataatcaaaaaaccattttcccattctcccggcagctccaactatcaaaatgtttgacattttagttttttcagttcaaaaaggacattatagccgatacagtagtagttagagtttattaaccaaatcacgaataatttccaaaccttcgatcattttcttttcctctaaacaagttgacaatcttacgtaatcagaataatttgatccgaatccacttcctggtgcaactgctactccatgatttaataatcgctctactagtttcaagtcagttaacttcaattcactgttgatttttgcaaagacatacattgctccctcaggaagtgtgaattcgaatggtaattttttcaaatatttacacattaattctaatcgccttttcattatcttgttattttcctcgggatcagaatccagcgcttgtaatgcgcataattgcattggttctgctaccgaggttagagccaatgcctgtatttttatgagcttgtttatcaacatgttatctctagaatatacaaaaccgaccctaaatccagtcattgcaaaagtttttgaaaacgaaccaacaagtattgatttatcgtagtcaaaatttacaacgctgcgataaggttcataagcataattagaataaacttcatcactgagtaaataaatttcttttttgcgagctacgtctattatattgttgtaggattttttactcaggattttgcctgttggattattaggataatttaagcaaattatttttgtattgatattaatttgactttctatttcagaaatatcgggctcccagttttgttccaaattagtctttactactctatttttaacacccaggtaatttgcacaatcatgacaagccggccaagccggctcaattgtaattatttcatcacctggtctcaacaatgcagaaaatgtacaaaatatcccgaacctgcctcccggtgtaacaattatcttgtcatgactcactggttcgaaaatatcaaaaccgttttttgctgaaaaactagaaatatgttttgacaaacctgtccgcaaatctttgataccagcagtctgcgtataatgaaacttgcgcatttcataaatcttagttaattcatccttaacttctaagggaggtagaaaatcaggttctcctacctccatgtgaattattctatgtccttgtaattctagattttttgctgcattaaatacatctaagtgagacttaatttcaaatttgcgaaccttattttgatccttcaaatgtggtgactgggcgaattgaacctgagaattggttataggattatttttttcttgtccaacctttattttacttttttccaaattctggattctgattgattcgttaattaacatgttaacaattcttccagaaaattctggatctaaatttaaacattttgagttgctaaacaaataactcttgatccctaattccactttatcgtcgataatgtcaagatccaaattggtttttatcgtcccgattttccttgcaatttccatcctttgattgacaagctccataatctggttcgtaatttctttcatgtcatttcttaagatattaacttcttctatcgacattttcgaatccctattgtattactcttggtatcagattagatttaaagcaacaatctagcaatatgatggcagcgatgctatctactacgggaggagctcttggaactacgcacggatcatgtctacctgttacaatcaactgagattcagtcatatccttcaaatccacagtattttggggtcgtgatatagaggcagctggtttgaatgcaaccctaaatacaattggcatcccatcagtaattccacctaatattcctccagatttgttagtttttgtaataatgctaccggtggatttatctaccacaaatgaatcattgttttcggaacctttcatcgttgaacctcgaaatccagatccaaattcaagtccttttacagctggaatgctaaaaatacctcttgatatctccgactctatcgactcaaaaatcggctctcctaatcctactggcacacctcgtactatgcattcatttatgcctcctaatgaatcgccctctcttctagcagacaatatcaaatccttcattctcccagctgcttcttgatcaggacaacgtacatcgttcaaatatctatttttagagagtgaatcaaagggtatttcagcagattccatagttatatccccaattgatttggtgtagctgattatttcaatatttagagattcctttaatattttcaaggctactgccccgcccatcacaatagtcgcggtcaatcttcctgaaaatcgtccgcttcccctgaagtcattaaagccaccatatttcatgtaacccgtatagtcagcatgaccaggtctaggttttgacatgaattcatcatatgatcgagaatcagaatccctgttccaaataatcatgcaaatgggagcaccagtcgtgaaccctttaaagacacccgaaagtatttcaactgcatcagtttcttttctttgagtggtaatgattgattgcccaggcttccttaaatcgagtaacggctgaacatctgcttccgatagacgtaggcctgctggacaaccatctataatagctcctatgcatttgccatgactttcaccaaaacttgacacagtaaagtaatttccaagcgtatttgaaggcatgaataaatttttagttgtaattctgatatattattatttttaatatttatcctgctgctgataaatcattctttttcaccgacaaagcatactcgataatttcaagttaatacatactcaatttgagctccaattccctttaactcactgataaaatttggaaaagaaacatcaactgaatctgcaccatcaataatcgagtgctccgtagatagactagcaatcgtaaacgccataaaaagtcggtgatcgtcaaaagaattgattgctgcatttctcaatttatctggggggcgaacagtgattgaatcgttatcttcctttatgtgagctccaaatttagttagttgagatgaaatattagaaaccctgtcagtttctttatatcttgcatgcgaaacaccagttattgttgttttattcttagcttttagtgatagaattgctactaccgggagtaaatcaggcgtcccaactaaattaaaattccctccatccagtttggtcgacccatctattttaacgactcctttgttcctatggacctcaattctgcctcccatttctttgataatgttgattatttccatatctccctgtggcattgtaaagtccaaattcttaatcatcatcacaccttctgacattatggccgcggacattaacaatgcagcagtcgaaaaatcccctggtacccgaatagtttgggatttatagtcattttcgacaggcagtttatattcctcagaaattgttttggctactttggatacatttgaatcccctaagtcaccaactaaatgacttgagaataatccatttgatgaattctccactttgactccaaattttttcattataaatatagttgaatctatatatggtttggaaacttggttgcctaacacttggatggtaattggtgtttgagaatatatgccagaaagaagtattgatgatatgaattggctagaaatttctccattaatctgagtagtacctcctttcataccaccacccttcacaacaatcggaggaaagtagtttcgatttgtggaaaaacaattgacccccagctgatttaacgctttgattagatctcccatgggtcgttttcgaagactcttatcacctgtcaaaacgctatagccgtcatttaccaatgagcacatcgaagtagctattctaattgttgtaccggaattgtctgcgaataatatatcatctggtgttctaaaacctcttctacctccattactttccactatgagatcctgtgtactggtctgattaccccctcccctgtttaagccactatggggacttgcaggataattagcgagcctatcgatattagaatccacacgatcattagaatttttatccaaagagttgaagcttactcctagcattttagcacattctatcgatgcaagggtgtctcgggaaactaatacattctctatgtgggacctaccggaggcaaggctcgatatcaatattgctcggtgactataacttttacttggaggacaaataacctcaccggataattgagatttttttacttttatttccacctaaatgacctgctatcttattcacagaaaattaatatcaatattgctattgttaatggcctagctcatacattccctagattattatggatatattgaaaccttgaccattttaaataatatgccagggtgggtttacttccagttatcgaggatctggtagtaatgattcaacttgtttgcatataacacggagtttgaattctgatttaatcaaataatctatcctctaattcctatcttttagaaagcaatgagttgaataatcctctaatttattcttaagaagatgtgctaaagaatatctcatttgcttgcctgtctggttgttttctacatacaaattcaactcaattaggttcatataattttactttcctttgctgtagtaataccaccagtatatatggttagtttattgaatcggctgtacttgcaatctgccaaataggccattcagcacaaccaagacctcgaacctagatctaaatacaatatcaaatattattattcaactgtcgctttggtgttgttgacttttgctaagattatttttccatcaaatttttccatcgaattcactaaattttcaacattatccttgtacaatatcgcagcaatcgctggtccatttcccgaatgactaatgcctaaacagtggttttcgaaggcattaatcattggtgcgtaattgttgtatagtacctgagtttactaggacaccgttgagattcattgctttccaataatctcctttcagggccagtctaaaggcgtggttgaacaagtctttatgaattcttaacttaggaacttcacctctcgcaacgcctgcaggtagataaataaccacagcaagatcgttatttaccacgtccctttttattattttcttataatgattatcagttaagattaccccaccatagtaacaagcacatgcatcgtcaaatgccccagtcatgctcacctttgcccataaagacgaattgactgcggtgcttaatacagctctgtcatagatctgatcatccaataacttgtaacatgcaagggatatagcatttgagaccgcactagagctcttcaggccccaaccagcaggtatttcagaaacaaggttgattgatataaaatgattttttatgatgctagctggtagtatactcctgataattttatttgccagtttatcatttacaaaatttctggatataccatgatgtccttcctcaagtgatatttttaccctgactttttgcgaaataccaaatgtacagccctttcctgttgcaatggcatttacaatagatacggcaccaaacatagtaacagaggcagaagaatttttcatcttaatttggttcaccaaatataccaagtaatgcctttctcataacttcccttggtgcattcactcctgtccatatttcaaatgatttataaccttggtttagtaacatttcgtatccaaatattacctttgcattggcgctctttgcacactccaataaatcagtcataattggtttgtaaattatgtcaaaaactattgatccattacccacagattctgagcttaatagacttttttcatttttaagacctactgaagtagtgttaataatcaattcacaatgcgaggaaatttcagatagttttttatcatctgaatactccatgggaatacaacttaatcccaaggtgctgcccaattcaatgacttttgacagtttttgttgatctctattcacaatatatactgactttatgcctttttttctggataaccccactagtgcagccctacttgatcctcccgctccaagaattaagatttctgcaccttcaaaatttgataatctttcttctatgggggccattaatccgtaaatatctgtgttgtagcccacaaaaattccatcttcgtttttgacagtattgactgcaccagccagtgaagcatcatcacttaacttgtcaatatattttatgatttctaccttgtgtggaatggtgacgttgaacccggctacattaatatcgcgtaatgattccaccgattctttcaattcgtttacttttaccttaaacgcaatatatgaataatttagattcagatacttaaacgcagcattatgcattaatggggacaatgaatgttccactggatctcctataatacaaaaagtctttgaagatttatctacggctacttgccgattagatgtatccactctaggactactcatgactctaatcagaatagtttttaaagcatatttattctaaagcaaaatatcttaatcatcttttcactctattaattcttgcagaactttttttagtcatttttcaatttaacatatcttgtatgctcttcttagcaccattaaatgaaatgattaatttaattaggaattttaatttgctattttgagctataaaagagcgttagcaggtggcaataaccagcaattttatttttgtattatacgttggacaaggcgtaattcttttgatcgattattttctttctacatcaagaaaatctaaagcatcatcagaatgatatttattctctaatgcttttttgaaaaattaagtttttgatttctcttgattctaatttgttgcggtaattcaagtgctaatgaaaccatttatgaaaactataactggttgtagaacgatatccataacttgcattttgcaagttaaaaacatgtaaaatggaaaaataggaaattaataaaagaaaatttctaatataccattattctttatcaatccagtttatttttaaacaaatcataaattgatttcatttggtttactgacaattgacctggggccaaggcagtgccaatggacgcatacgtaaagggggcatccccgactatagtgcaaaaaattctacttaatactcccatttcacccattgcgaaagcgatcaatttaacatgagtatcaattgattgataaatacttaaaatcttgatcgagtcgtctatggatgttgcggtagtaactatttttacaaatgggctgtaaatatgcatattttttacttgttctaaaaggtgatcaatttcaggagtataagaaaaattatgccaacttactagaattctagtattttcattttcaaccagatcagcaatagagtcgttacttgaaattaatttgtattctatatctacaaagagtggttttctatggataaatttgtatattatttcagctctttttttagtatcattagaaaatttcccaccttcattctctggtctgattgtataaatgcatttgtcctgatatgttgacaaaatatctagataatgatctaagttttcgaaactactaaggtaatcaaatcggcactcaattatatctgctcccttctttaatgcctcatttattttatttacggttaaagtcaaatctttgctgtcatcaaagtccttcgtaacagggatcgatgcacataattttctattgatagacaagtttagataattaatgaactagcatgataactttatgtctttctcagtaatcacatattttagataaggcttgaagtatctcttatttgtaaatctcttttaatcttattattgctatcccaattagataaagagccagcattggtcctgtgatacaccacatcgttattccactaccatcaggagtaattaccgcaccaaagatgatcattatcagcaatgcatacttaagattctttatccaaaattttaaacttacaagaccacttgctgataggataaacataaccagaggtaattgaaaggagatcccaaatgctataaaaaactgtaggacaaaattaatgaaatccgagatgtttagaaatgtaaggacaccaattgtttgtccatattcatacaagaaagttagagtgattggaatggccaaataaaaagagaaagccattccgcttatgaaaagaactgatgtcggtagtagatatatcaagaaggctttttccctacttttaaaagacatcgcagggctgatgaatccaaaaacttctctaacaatcaaagggattgaacaagatactgaaataagaattgcaacatagatttgcgcgtaaagggcttgtcctggcgctgtttgaatcaaatcgacaccgttcgggatcaggttgttgcttaggaataaagtcacctgacttgcgatattattatagaccgtcgggactatgaaataaaaggaataattattcacagtcaccaagtgaatgccaaaaactgtacatgtaatcattattgctattgtaataattaagatccttagaaatcgatttcgtagttcttttacatgatcaatgaacagcatatcgccatgtgccatttaccttagactattgtacaaaaaaaagtaaaaaatataaactatacttaatctaacctgttgaaaaagttctaatcatgaaattgtcctttttgtttcaattctatacaacatgcgatgctatttttttccaatttgctatgagggcttcaggtctaatgtgtaaatcctcgttcaaaattcttttttttgccaagtcgacatattcctgcttaatatctataccaagaaaatgtctatcaagattgtaggccaccttcgtagtttgaccactcccattaaatggatcaagcactatgtcaccattataagagtaaattttaagtaaacgataaggtatttcctcgggaaaaggacatggatgttcgatataacctgggggtaccggagctatatgccatacggaatttgctatttctttggtccactcctcatgtgtagccggtaggatttctcttctttgattcctgccgctcttcacgtcaccctttcttaatactaaaatgaactcatgcataatatttgccctatagtattttggataggggtttatgacaaacgaaccatacctattagttcctccagttactttgtgccaaattatttcttcatgaagactccagtttccccctggtgtcactaatttggaaagtaacaaatggggcaatggtattaatgtcccattaacaacttcgttagcgattacaatacagcaataaccaccttccttggttacgcgatatacctggtcattaaaaatagtaaccatattttctaaatattcatctaaactgaccttttgaatccctctataatactctgtatttttttttgaggtgtgtaaatcatagtctatggcattcccgtaaggaggagaggtcacagtcaactggatacttctacagggaacattttttaatatcttttcacagttacctagtaaaattttatcgtatagagattcggacctgattagcacaaattctgattttggacaaggtccataatcacattactctaaaaatttatacagattgataaaaacatttaacaaaatcacaaaccagttttatcatttctcgaggatgtactcttttgaaacttccatgccgaaatgtctacctacggatggaatggaaaataccaatatcttatcaccccgttttgcatgagtgactggcaatatttgacctctctcattcaaaaatctgatagtttcagcattttgaactataatggttcccatttcatcatcattgattgctgctctaaatagtcgtaacggtcgagattctattttagctctcccaacaccgaccattcgagcctcccccttggtgtttactattaatatctgacttccagattcaagttcagacaaatactttgttgtcccatctggagttatagtgtagcagtgtactgcaccagcgttcactctaaaaggacgaggtgatgtaaaagatgaacctattgattcgttgtggatcaggaacaaaaaattcgacttgtttccaaccagcattccctccccctcggccagcatagataccgtatctatgcacactctttctcccattcccacctcctgcacttctcttatttccgcaatttttatttgaaacgaagatttcttgatgatatttcttgctctaactatttcctcttcgctatttgttgacattagtactccgtctacccccaattctaaaacggtgaatagagtttcgacttcctctatggattttgcgacagcgaatatttcggccccggtattttggagagaagctataacattttcaagtggtattaccctccaatcatccaagtctattataacaaatgacaaatgaaatttatctattaaacgcttcaattcatctatatcctgattgctggtaacctttttgtaaactccagttttcctgcctctagtcagatttcctgagttgatttggtcaagccgttgctctgattcaacaatcatataatccgcatccttggaattaaaaatagttttaaatttagttgaattttggtccagtccttcaagctccaatgaaggatcgatataaatcaaatcaattttgtcttttatcctggtaataaaactagcaaattcatcaaattcatttcttccacctaattcagggatactagaaagatcagaattagaatagaataatggttttaatattattttcttggctttttgtttattcttactttcttccgcctttcttggatttgattctgccatagtgcttgttctctataataatagcatacaaagcttttattatttcatttggattatcatgctgaaaaatatttctgccaaaagttacgccaatagctcccgccttcatcgcatcattacacatctgtaatatttcaaggtccgtatttgcttttggtccacctgcaattacaattggcacaggacatgattttatgacttctttaaaggaatctatgtcacctgtgtaaacagtctttactatatcagcccctgcttcagcaccgattcgagctgtatgagcaactatagtcggatcgtgggggtttggaatactgtctccccgaggatacatcatcgcgattaatgggatattccattcattacattcatcagacacttggcccaacttatagagcatgctaggctcctctttggagccaatattaatatgcaaagaaacagcatcggcacctaaccttattgcttctttcaccgagcccatcaagatcttgttgtttggatctggaccaagggaagttgcggctgacatgtgggcaattaatcctatggagggtggcgcagggagagattttataatacctttatttactagaaaacaagttaacccagaatcctgggtctggtttatcagttcagttatattttgaatgccctttaatgggccactgcttattccatgatccagcgggatgcacaacatttttccctttttcaatatacgatttagccggatttctttccccaggaccataatacaagaaaaattataaacctagttaaaagtgatatggttgatataccaaaaattttgcatctccaatcctggtttcattttgaaattttacagataggtggaaatgttaatttatgctgattatttttcatcctgaactgaacctcttcaataatctctattgacgatcctggaaattcatctgataaagcttgtctatcatagtgtacatttttagatgactcaaagaattgaagtattttatctagttggttgaatggcaaacccagttcgtcttcggtgaattggttggcccataatctagcgctgctctttttgtctaatactgagccaggaatttcaagatactttcctaaaccgaacaattgggttttatatatgtctcctaggggcagtaaatcggcagccccatctccgaattttgtaaaataaccaagcattagttcggtcttattcgaggatcctaataccagcctccccattaaaccggagtaataatacaacacacacattctgactctagcgacaaggtttccggtcaacagaatattatcagcgtgttcaattatttctaagaaactattttttggtttgtttatgtaaattttttcactgtcaattttcaaaactgaacatattctaacagcatcttcgatatcctttgcgggggttacagtttcatctggtaatatcaatccctttacattctctggcccaatcgctcttgttgctaaaaatgcaagcactgtggaatcaatacctccagagattcccaaaactactccgtttgattttctagattctgtttccttttttatgaaattcatgatttcctggcttactgattcaaagttcatcgaatttgaagtcattattataaatattatattaattttgtcatgtaattattctcagattatacagaattatgaaattccatcagagaaaaacctgctttgtattaatagaattattttaatatgcaggatcaatattagaatttaggtcattggatacacgcaatataggtttaaggaatatcgaagtagcggacacaaaaatatgttctatcgatggtgaaaatggaaaattaatctataggggttatgacatacttgacctagccaatcattccacttatgaagaaacagcgttcctcttgctgtttggagatttacctataaaagaggaacttgatgatttcaactcaagattgactgcgtctcgaagaattcctgattcagttaccaagattatgaaaaataaacctgttacagcacatccaatggatgtattacaatcttccatattagacttggcggattatgaccgcaacaggctagatgaaggaaaaaatgcaaacattgaaagggctatatcgttaatcgcaaagatccctactatagttgctgcatgggatagggtcagaaataacaaagatcccgtagagccactagatgataattctcatgcacataattttttatatatgctaagaggagaacacccgaagcatgaaatatccaaaatatttgatatcagtttaatattacacgctgagcatagttttaatgcttcaacttttgctgctcgggaaatagcatcaacgcgtgcaagtatatatgcaagcataggtggtgcggtgggtgcattgtctggggagctccatggcggagctaatattcaagtgatgaagatgttgcttgaaattggcgatgtgaagaatgtggataaatgggtccaagaaaggctcgcaaaaggtgcaagagtcatggggatgggccatgcagtgtatagaacaactgatccaaggtcagaagtccttgcaactctatctagggctatttccaaagaaaaagattcaaaatggtatgatataaccgaaaaaattgaagaagtcacaaagaaaatcatgtatcagacaaagaaaatgttgatttatccaaatgttgatttgtatagtgcctcattatactatactttgggaattcctattgatctaaatacaccgatatttgctatatcaagaatagcgggatggaatgctcatattattgaagaaaaatttgccgaggcagctccaaagccagctctttataggccaaaggcagtgtatgttggtagatattgtggtccgatgggttgtgagtatattagccttattgataggaaaactcaaaatccaccaacttcgtaatattaaattcgtttagaaaatatcatgctcttaaatttataagtccatcaaatttctctaattcataacgttgaagtcctcaagcaagaacaatgtcaaatatagtgatgttgggatagacgttgacaaaataaagtcaatccaaaattctattgggaaaagtattatgagtactcatcttttaccaaaaaaaggtaaagtaatttctggatttggtcactatgccggactcatagaattcaataaaaatataatgacattgcacactgatggtgtgggttcaaagattttggtggctcaagccatgaataagtacaatacaattggtatcgactgtatagctatgaatgttaatgacaccgtttgtttaggagctactcctataggatatctttcctatgtcgctctggaaaaaactaatgataatttattaaaggagattactaagggcctggtcaagggagctaatatgtcaaaaatagcaatagttggaggggaaacagctatacttgcagatattattactggacaaaaaaaagaccataattttgaccttgcaggaatggttcttgggatattagaaaataagaagaaattgatactcggggacaatattcgacccggtgacgtaataataggaataaagagttctggaatccattctaatggattaacgctagcaagagaagtcttgttaaaacagcatagtattgacgataagcctgattttattaataaatcgataggagctgagctattaacccctaccgctatatattcaagtgttatccttaaaatcgtagaaaaatttggaacaagaatacatggacttgcgcatatcacaggaggtgcatttacaaagctaaaaagattgaataaacgtgttgattacgctttagataatttgcctcctattgatgggatatttaaacaaattatggtggatgggaatatttcagaaagggaaatgtataggacctttaatatgggaataggattttgtattattgcagcaagagaatcagcggatgaaataattgataccattaatattgaaagaatgaaagccagcgtaattgggagtattaaaagaaatggaaagggtaattcatttattaaaccatcaaatgataagggaaacataacagtccaactataagcaataaaatatttattgtcccattatattattatatcttgcttgactttgaaaatcggctaagtaaatactagtggattgaacaattactgaacagtattgcctctaacggaacctagtttcattattttgaatagagaatcaaatatattgaaatgattttcaaataatttgccattttagactgtgattttggaccgtgattagatagagacagaaattaggaaatatactggtttttttaataactttgcacctatttttctcttaccacgcctccagggtatgagcataatttcttgcaaattaaaggaaaatttttcataaaaagtaggaagagatatttagtcgagggaatagatagattttcagagggacattcgctagattgtttgtaaatgcgtctcgatataatgctaaagatattaaccaatatcagcagatatgcaaagaaatagctaatgatatcttatctaggaaggataatagtaatttaatgaatctaagtgagatcaataaactaataaaatcgaaatcctctcggtacaaattacctagtatcccaaaatatgctgaaataaaccggtatatccctatcaccagtcaatataaaaaacttttaaggaaaaagcctgtaaaaactcaatcaggaattgcagtcatcacagttatgcctatgccttacgactgtcctcacgggaaatgtatatactgtcctggtgggaaggaatacgataccccccttagttatatagggtactgaaccttctaccaaatttgctcaaagagtaaaatatgattcttatgaacaggttcgttataagataatgcaattgatggaaggcggtcatgaaattagtaaagcagaattagtaatagttgggggaacgtttccattttatcctaaggattaccaaattcattttattaaaagatgttatgatgctcttaattctatcaaacatatggatatagattctccaatccaatcacacttcgaatattcaagtaaatcggatgagatcatgatcctttcgacagatagttctctagagaaaagtacatttggatcgaagtcgaactcgctcttactatcacttaatcatgctaaggaacataatgaaaccgcctttgtaaggtgtgttggactcaccattgaaacaaaaccggactattgcaaaatggatcatatcaatttgatgctggaacttggaacaactagaattgaactaggagtccaatcactaaatgataccgttttaaaaatgattaatcgaggtcacactatccaagatgtttatagatctttttatgaggcgcggaattcaggttataaaattggggctcatatgatgccaggtttacccggctcttcttatgaacatgacttgaatgactcaaagattttgtttgaggatgaaagactaaaaccagatatgctaaaaatctatcccaccctcgtagtacgaaacaccggactctataaaatgtataaagaacaaaagtacaaaagttattcaacaactgaattggtagaacttttggtagagataaagaaaattatccctccatgggtaaggataatgcggatacagagggaaatagaagctcctgacatcatatcaggtcctaaaatgggaaatattaggcaattagtgttagaagaattaaaaaggcaaggagtaaggtgcaaatgtatacgttgtagagaaataggactcagtgaaaataagatagaattttcaaatgatgaaatcttgttgtttagaacagaatataatgcatccatgggtaaagaaattttcctatcttttgagttaaaagataggatgcttcttttaggttttctcagactacgaatgatgtctgatcctctaagaaaagaattacaaacagaattagatactatatcaagattcaataacaacgatactacagatttgaaagtcgaatcatttacttcagcaattgtacgagaactacatgtttacgggacagtcgcaaaagtgggcgaacaagttgccaatagacaacctgtatctatcaatactaaatctgatattatgtacatgaatggtgataatagcaatgatagaattcaaagtaagtttaatcctcctgctagtgattgtgatggtggtttagctcttaataatcaagttaaatatcaacacaagggtctaggacgaggcttattagctgaagccgaaagaatctgcagagaagaatatggtttgaaaaaaatttcagtaataagcgcggtaggaacccgagactattataggaaatttggatatactaataatggtccgtatgttacaaaatcattataggatatatgagtagttctcctgaaaatataattggaaaaggaacatggattgataaaattgcttatacaatagtcgaacgagaaaaaaaactcggcaggtcaacagaaaatattaaggttgaaagtggtttaggagcatctgggattccccatattggtagcatgggggatgctgtgagagcttatgggatttctttagctctgcagaatctcggttattcatcagaactaattgccttttcagatgacttagatggattaagaaaggtgccagttggcctgcccgaatggctggaaaatcacatttgtaaacctgtgtctactatacccgatccctttggtgattgtcacgattcatacggtcaacatatgagtagtttattattagaagggttagattcggcaggaataaagtacacctttaagagtggtacacaaacctacaaaagtaaaatactaacagagcaaactcacaatatactttccaatagtaaattaattggtgacaagattgcagaatctactggccaacaaaaatacctgaaatttcttccttactttcccatttgtgaaaattgtaacagactttatgttgcaaactctattgattatttagaaaatgagagagcagtaacttattcgtgtaacggaaacacgattggaaaaaaaataatccaaggatgtgggcatacaggtcaagtcaaaatagatagcggaaatggaaaattagcttggaaagttgaatttgcagcaagatggcaagcctttgacattaaattcgaagcctttggcaaggacatcatggattctgtaaaaataaatgattggatatctgatgaagttttaaaatttaatcatcctttgcatgcaaagtatgaaatgtttttagacaaaggcggcaagaaaataagcaaatccgctggaaatgtcttgactccacagatgtggctaaaatacggatcacctgaatcacttttattattgctatacaaaagaatctcaggaactagacatgttggtattgacgatattcctgcactcatggatgagtacgatttattcgaagatatattctttgggaaaataaatgaatcaaatgatagcaaacgattgaaaattaaaggagtatacgaatatatcaatcaccttcatccacctgctgataattcctcgtctgtacatataccttataggatattaatacagcaggcaaatttatttaagaaccaaatccgggaatcagacttgctacaaaaaaccatatttgataggctaaagaaatatcgtctggtaaaggaagaagacatcaagaaaaaggagctgattgataaaataacccttgcgataaattgggtgggagattttaacggcttgacggaaggtgatggtgaagacgacggaagtacagccggtgaaaaagttgtaatgagcagtattcataaagaagtgatatttaaaattggaaatgatttatctgcattggcatcaaccgtaaataacagaagcgaagatgctaaaactaaagacgacgatttggcccaagacatacaaaccataatttttaacaatgcaaaaaataacaatcttcaaccaaaagagatctttagattattatacgtgattttaataaacgcagaaaagggtccgaggcttgggaactacattgtagacctgggaatagacaacgtggtaaaagtaatagaaaagagaacttgaccttatggaatggattggttacattaaatttttgtgtgaatggaagttttacgatgtcaattatttcacttcaggtttttagggatatcctttataggtatcaaaatttaatcatcgtaattggactaattatctcattttcgggaggcagttgggatataacgttccatattctgagccagcctgagagtttcttctcctatccacacaccttggtatatactggaatattaatagtaatcagcatattttttattaattttggaaaaaacatctcaaataaaaatcaggatagaaaagataatttcctaatattaatgggttctgttttaattcttacagcaggaccatttgatttctcttggcacttaaagtttggcttggatggtcttcttagtccaccccatgtcatattattgactggatggttgttggtagggttgggcaaccttcggatcacaaattatttgattaatttaatcctcctccagaccgaaagatcaaacaggagcagatctgttgatggagaagaagtaaactatcaggataagtacaaaaataatcatgagaattcaagcacagtagataatacaagcaatctgctggacaagaaaggattacaccttcttaaaattcaactcgttcttaatctttctattattttggtgattttgtctggatttatctattttttttcgctaccattttcagaaactcaattttacaattacaacccagatccactaattgcctttttgatctatagttttgggttcccatttttgctttctagtttttttataagaatactgaaaaattatccagattttgatgaaatgacccttttggtaggaagcttttatgtaataatcatgcttttaactcagatcgtctcaaatccatttttgttcggctattcatcgtattatatattaaatataacaccatttgtgataatttatttaattaacaaaaaacaagtaaggaaaacatttaccaaaatgaatgtaccaccatcacctccagcttcatgggattcaaaggccaagatgaaaaaatacgtaaatccaaaaatgtatgttttatatgctttaatcctagctattttttcatttacaatttgcttcccactcaatacctacattttgaatgaagaactctatggatatttggtataccagaatgtagttgtcaaagtatacactcagatattagacgactacttctttatcattgtgagtatatctatagttggcgggcttttaggatatggtcttagtatgagtagcgggcttgtcaagccttcaaagtacaagaaaaatcaattgtatcaatattttacagagcatagaaaaggaggggataaatccttttttaattctaaacaaaaatagaatatgaaaattttggtaaaagtgataataaaatatattttgtgcgcctcttatgtccaattatgagaaataacatactaccatccatttctaatatcatctcagaatccaaggaagaaaggattatttactacagaaaattctttgctgaactgagattaaataggttacattttcaattaacaattttaaattatttctctaacctggatacaccagaaaatagtcaatcttttgctaaagagcttgaaacatatatttctttttttaagaaaatggatagttggttggaaactctaaaaaatgaagggttataccccgagtttcaagaacaatgcttagatgagattaaagccatagaacagattatccaaagctatgagggcaagatgaaaaactaaacactgggtttatcaaatgacctaatgtaagcaaggacggtattaactattttttcgtgatctgcctctttctcaagtgatagtcgaattatgtgtccatcgattgggaaagaaagcattttaattttttttctgactgttagtgaatagactacttcccctagtttagagtcaaagtcagtatgtaattttgaaattaaggcaaattccatgtatatttttacagattcagtttcagattctagtgaaatttttccaggtctcattccaccatatgccaatcgccccatatcatcaattaatcctacaaatctgatatctgggtcaagcccaatgatataatcataaatggctttatagtttaatttatcatcctttatcaatattttcaccgactaatttcaaatgccagaccaacatatttagctttggaaataatcgaaatagctcctcacttaaatgtccccactatactcgtggactgatatgacattcatcttgaaaacaaattttttgccaggttacgggagcagcgatacagaaaaataataataacaattttcttgaaaacatttaagaaaaaatacagtattttatttagcaggatttgcttttaacagctgagataaataacaaaaatttgattaaataacaatcttttggtttgttttgaactatagatggagttacagtcaaaccaacttcttgtatcagaatctgattttagtatttcaatcatattaaaaagtaaaagtgaggtgggctgactatggattaaagcactaccccacttttactgatgtttgccgatcattcgagaccagttgtattctagaatatttaataaagtataaatacactgatcattttttcggcaatttatcgcgaaattcttcacaggccatccagcattaaggagaaataatgtgagcagtctcctaaattcattacaagccctaaaaggtatgataataaatagtcagtgtaaaataacttttatatttatccaattggacttcgcttttttaagcgatgttttgaaagcggaaattatataaataatttcttgcgtttatgtataatgttttttaaccgttaattattagggagatatagagtgcatttacctgaaatctataatatcacaatttgaatagatttttaatcttttgatcgataatttgcctacatagattttttcaaatctagttttttcatatattcttgttaggaatcaactgaatttgagatgcactacagattatatttaaggatcattcaaagaaatacaattcaaatgcaaagaggatttatggttttaattattagtggtgctctatttttgtcttcaataatagtgttcttcatgtgggggatgacctttagcggcatgttcgttcagaataatccaagtctcactacgaatcaaataacacttgatccctcaacggcctataactctagtatttttattaattccacggacaagctgcttactattaccattgattctacgggcaatgatcacaatgtcctaaatgaattggtaactgatccaaatggaaaaatagtatctaattctacttttcaaaaaacctatttttcaaccataactccaaatgcaactgggaggtatgatatttcgttgttcaatatggatcaaaacaataaggcgtccgtttatctattttttggtaatttaccctttttaaaggagaatggtgaaatagacctaagtagttttggtggtttagtttttggagtaatattgtttattgcaggattagtatgttttgtagtaggaattgttttatatcttaaagataggaacaaagaaaaataccatggttacataccaaggtagaacttacaaattacgatctttcaaaccaaacaatatcgggtcaacaaaacgagcagaaaaaaacaagcttagagggctttaaatatattgagccaggcccaatttaggaatactcagttaagttacagaattttatttttgttcccctgattttttgaagataattattgtctatatcatgtagctagtataaaatatgaaatcagggattagtatatttaaaactctatacatgacttttgggatcgtaatttattcattataaggttgatgagtcagttataggtcaagaaaatgtctataggtacttgcattaaaaagataaaaaataaaattagtcgctgctactttgggctaaaacattgtgatcgaagttttgttggttttggaagtagatgttgttatcagataagaaattgccgccgccgctgattgattggcttttttgtgagcttttttggttttcttcaattttatgacttactttattaccaccacctgttaaagcatatcgagatattgctattggggctacaattaatgcaaatgcaattatgactgttcatgtgtatctaattcagaataagacataaatataaagtttatcaaattggaaattaaacccaaacttgaatcaagtcctttatttaggatataagatagaacctactacctgtagaaatgaccattacaaattaaggtaattattaaacatacatttgtttatttaaattaattgcaaaactttatcatttgttttcaaatggaactttgttacctattggtccaaggtaacttgaatagtacaaacgtaattgataatatacaaataaaatcgaatatcaaaactgaatttatttattcaatctagaatcttttttaataactaatggttattacttgtattggaagataatagaattttggatagtatgtttccttccgatatacttccaaaagtttacccaaaagaaccaaccccacaagaaaagtctgaaatggacgatgtcttggatagtaatatttttaatgttatgctcaacaggcgctcacagaggaaatttgacgaaagagaaatagagggttggaaaatagatatcatttttgccgctgctgacacagcacccactgcgggtgggttccagggttttgaaatttatcatcttaaaaatacccagctgaaacagaacctaattaaagccgctaataaccagccatatgtgaatgcaccattggttttagtattttgttctaacccttcacgaattaaattaaattttcattcagaggtactacataaattttctattcaagacgctactcttgcagctggttatgcccaattagctgctcatgctttaggattgagctccatttggataggcatgtttaatgaacaattacttaaagaagtggtaggtactgatttggaaccttcctcgatcttatgcattggatatccaaggaaaatgttatttcccaaaccaaagagaaatcttacagatttaatacacactgtatagctgatccatttcaaaatactactattttattggttggtataggtattacattttttttcaaactaggaataacctaaaattacattgatcaatctaagttttctatctcatagatcaatgtcgatatccgttggatttaacatgtgttcaagattaaaaatctgaatctatttaaagcgaatcgttacgataataataattaattaaaaaaaatttaaaaaaaggcttggtgaagtttgagttcactggttcttgtaaattgcggtatagggtaaatcaaatgattcgtataattctgaaacaccagcatttgtattcttgtcaaattggtctcctaaatccaatttatcttgaaatattaggtttggtgaagattcggcggactgtttttgcatatcattgtttgtttttagtggctcgtctgaatctgtgcccttatttaggttgattggtttaatgatgtgatcatcttgtgatgctactgcaggaccggcagttagaacactatcagtcttactctctattccactactttgatcagcatcatcatcatcatttgaagatgcagaatcgtcattttcagatttgatatccgaattttttgatactttgttttcatttccatcacacgacattttatctttcgtgtcaagattattagttccatttgcaattcctttgcaatccaaaagctcgtccagggccattgctgaggacacctgacttaatcccattgagattgctatggaaaatattgctactacgagaacacctgcgttttttgtagaaaaacttttagtactggtcatagacattaaggattttatttttataatttatatcaaatttgaagaatgtagcagtaaaaaattgctaactaaatttatttattaattcttcttatgaaatcaatcatgtggtagtatatttgtaccattgtccagatttgaattgaggtatattgggatgttggtatatacagatctcattgtccgcctagaattgcctatctcatttctgtccaaacaagaccaaatacccaaattctagaagcattagctctgttttaacttattgttaatcgaaacttcaaaattataatggattcatcaataaaatctttatataaatttacccagattaggataaatactaaataaagtacataatccaagtgacaacatacacaaacttcagtattagtatagaagaagaaaagctaaccaaattaaaaacgatagttaaggacctgtttgaatctgggtcaataaactcaaatgagattgaggagtttatcaaatttacattatttatcgtttttgatgaatacgaaaagaacattccttcattgaaaaaattttattcaatgaatctaacgaattatctagataccaaagatcgtcaaaagtaggaaagggggaaaataatgatttaataaagtcttgatattaccaataaaaaatgcagtttttatataaaagtatgtagtaaagtatcttaggaggtgcttaatttaaaaagaataagtaaaaaagagcctcactatctatccctaatagtgaaacacagtatcaccaatagttttcttccaatcagaacggataccaggttttccttttaatttctcaatataattaaatgcagaaattcctgcagacgcaccgtcaccgcatgctgctacgatttgcttataaggaatgtttgttgcatcgcctgacgcaaaaattgctgggtgagtggtctttcctccatcagtaacctcgatctcaccttttgtgttaagtttaataagatgttttacaaaatctagatttatcttggatcccatttcgacaaataaaccatcaacgtctatcattttctctacacccgcattatctttaatttgaatttgctgtaaagagttgttacctgaaactagggtaactgagctatttggaatgagttctacgttatttttctttttaatagattctatcatatccctatctcctcctagctgaccaccacgataaataaggtatacttttgatgccattctagacaacaatatgcctgattctaaaaggtagcccccaactccaacagtagcagtagttctgccttgataaaaaggagcgtcacattttgtacagtaatgaacgcctttgttttgaaattggatttcattttcgacccctaaattatttggaacttttcctggtgcaagaattagtgcttttgtgagatattcagaacgtcctgtttttaccttcaggtctgtactgccttcaatttgatcgaccttttctacagtatcataagtcatttcaccattaaatgttaaatactgattttccaatgttttagcaaggagtggtccgcttgacatcatggtaccgggataattctcaagtttaggaatcaggttcatctgtccacccaagtcctttgaaatcaaaagacatttggtcctctgtcttgctacaaatatacccgctgaaagtcctgagggccctgctcctactataataacttcatactcttcaattgacattctcaatcatttctccaatattctacctttaacaaaacaagcctcgtcttcttttatgaaacagatatcaaagtggtcatgttctctattccttcaataagaggtaacttttcatctatttcgctttttacttgttgcaaattatcggactcaaaaatgatcactagatcataaattccatagacagattttactgcccttactgtagataacagctttaattgatctattactttggattgtttcttataattaacattcaataatacataggcttcactcaaaataatctgtaattatgctattgcctttattaataaagattgatatactgtggaatattttcatattaagtagttattatttcagaatttttatatatttaatattttaaatcaagtttttttatatggtctaatccaaatttcacagcagaataataatttttattcaagattgtgggttcaaaactaattttgccatcatatgaaattttttttaaggcttttattatcgtattaaaatcgatatggccaaaaccaggcatcttcctgttgttatcagcaaagtgcatatgggaaagaatagggtgggaatttgagatcgcatcctcaaaagaatcttcctctatattcatatgaaaggtatctaacaggagttctagttcatcacacttttcattcaacgagattacatctgaataagtacaacagtaaggtgttgaatagcgatttagtggttcgaccatcaaagagacattttcttctcctgcagtttttaaaagacggttcaacaatggcacacaacgttctaacactttaatcttgttgttttcattaacgtttctatgggttacatcaaaagaataaataggatctgaaaacaaacataaattaattcgttttcctccaaaatagttacataacttaatacactttaacacatactcttcagaatatttcagtatggatttatcgttacttaaaagacgtcttttccatccattcaaactcgacctgccccacattccagtgatacctattaccctcacatcaaatgaattcaaaagatccttaagggataccgagtttacctcatctggttctccatacaattccaattcagtcaaaccgagtcggctaaggttctctagagtttctaattcgtttttttgtacgttcagaaatgaagataatgtaatagaatatgaaaatgccatttcctttgattcttattttctattattatatgctaatatgcttctaattttcctaacttcttaaataaagttcttttttacaatgtcaaaaatatctaggcaatttattactggacacccgtcaaatttctcttttttgatgtgttcaatctttttgtttgatatgaaggctgataatccctctcccgattcaatattatatggtcgtccatgggaaccctttattagacgggtatctgtggagatgcattttctttttgggtctatgaaaagatctagaggatcataaccgggttttctgtgaatatccactgttttagtaaagctaggtgcattgtcattgccatcatcagtttcagttttatccaaatttgagctcttatttttctgttcatcgtaccaccaatagtaactaaaccatttatccatttccgctattgcaataaactctccacttcttgaatggtttatgtggagtttttgtttttcttcctcatcacaaactttgtcgattccgggaacaccttcaatagcaatcttaattttttctttgctcatattgtttctgttgttgatataaatgtgcgctatctgatgatctaccattgcaaacgcatcactatattcatagtcaatatactcttttccattaattgttctcacctgaagcaatcccttttctcttaatattctatttattggtattgcatctttgacatcgttaaatccgtactcagagagcaatagaaaatgagtttcatcaagaatatctgcttccttgaccttttctataatgttaccaacataaatatctatttgctttaaatcatcggttacttgggaactagaatgcccagatttttgcgcagtataatcgagttgtggaaaatatgcatacaacaaattgggacgatggtttttgatagtgtattgaacagattttgatatccattctgaggactttatggatgcaaatgggccccaataattcatcagattgaattcgccaacttctttgcttatttcctcgtaatagttaaccggtttagaataacaccacatatccatctgtccattttctaaatggataggacgaggagtgacaatatagtcattgttcgaatacatagaattttgccagaataatagggctgtcttaagcatgttatttttgttttttagtgtatcccatattttttcagattgtaccagattagtagattgctcccagaacaaagtctggaagttttctctatcgaaaaaaccatttgaaataatgccatgttcctttggatattttcctgtcaaaatactagcctgtgcggtacatgtaactgagggaaacactggtttcatgtatccatattcaccgtcgttctcaaacaaactggatatgttaggaaatatttgtgctgaagattcaatacgagaaacttctaatcccacgatatctaaaataacaaaatattttgaatttttattggtgttgtttgtcaaacaagtgaatatattggtcatagtatttattaatcaatacaaaattctgcttgtataggtaatacaataaagactaggacactagtttgcttgtccaataataatttcatcgccgtcattatagaggaatactaaatagtgaattttacagtacaaatccatttaatccaatattgtcaaaaagagaaaattggatgacattaaaaaaagaagacccgaagacagatccaaaattcgttagttgtctatgaaatgtgtattaatcaattttttgtatttttaaaagtatctcgcacttgggacaactcaagcctaagaacttgaataataggtccccatcctcaaattcttctgttattagttggcttagatttattgattccttacaagatggacattttgccatatataggagatatcgtaagttcttatttaaaactagtgaattaaattaatataaacaataaaaccaggttttttatgcttgaaacatatacaatcggtttaattcttgttgatgatattattacttttgataatcaagaaattgtttatattatagttaggtgcacctaatattgcatctaataaagcattgttgtcaagcaaaaacaacatccaaatcccttgcttgatatcccaatgtcttaccttcaaaccaatacacgtctggaaaatctggaagttgttgaaagggtcggcatcacagtacaccacgattggtattatggcggaaaaagggttgatattttaaatgtcacccaattttcaactttcaacacattcattattaaaattaatctttatctactaaaacggtcttgtagaggggcacttactaagatgataggaagagcaataggatcatgacttaattactattctctacatacaaaaatatgaaaggctatcaaaagctaactattattacagctattctaggactcattattccctttatcgggctctttttgtattttctgataaatagtctttgttggaatcccaatattagccctttttgttggttgggctctactaatagcaatagctataataacaataaacgtaggagctattgttgctgcatttaagattaaaaataataaaatcgttggaggtatcttgatagcgtgtggagtaatgcttttcgctcttattcaatggttcgcaataccagcattggcattatttgttattgcaggaatattggccatacgagaaaaaaacccactaagtaatctcaaaagggacaatataacaccatagaaagttcttttatctataggtattagtattttgcgaaccttcaccttatttttttgaaatatactatgaaaaaatgcgtaccaaaattctattgagttgatgtgcaaacaaagaataataataaaattaccgtactttatttactattagttcttaaagtcaaaccaatgatttttttctattcttcactcatttcctttgcagcatcttcacattcagacatttccccgatgcctgatgatcctttcttctcactacaattattgatattataatagtgaattccgttattgtcagttaggtatttgcctctttgtggagaatccgatgaggtatcattatttgtaccttcactactaacattttcctttaaagtatcatcagaggaggtaaaatcactttcatttttcactaaaggtgagctggtattaatagaggacaatgcatttgtttgatgagaactttgcccagttacattattattcttactattagaatttgtaattaagtttgaaccctcatttggaatgataattgtcgttattggattactttcaaaactacttgttgaagaatttgaaaatgttgaattcttctcaggtaagaaagaagaagcatgactgttgggatcatttggtggccaggtaaagataaaagccgatgttaaaaaacagcatagagttacaagtaaagtcaaattaatagttctattcatgttgaatacacttcgtgaaagcccatttaaaaaaatttgtaatttaagcactttaactgatatacttatatctagtcagatcgtaaattaggatgaaaaataagaaattataatttaatctatgtactccctcaagtcatgctaatccatttaccaagtattatgcacggaattgtaagtaatgctacacttgacccgctgagtagaccagcttcaccagctatgaatgcgcaatccagaattataagcagaattagcatgtgtttgaccatgaatcttatcactgattcgccttggctgtggtccattttggaagctcgattaaaaagtaaattgatcaagaccaagaagaataggatgaaaatcaggaaatccaatttatagggtattaaaattattgctagtgataaagagaaaagcagaaatacaagatatatgatttgaattttttgaatatttaggacttttttgactcttaaaaattctcttgttgtttcgcttttgctaagagaggtcaggatgaagatatgaaaatacacggcacaagatgccaaagcaagtaatagaaaagagctaagacccgtgctataattggataggtcaaatacaaaactggcgccataaataacattcaatgctcgtattcctgccatcaaatatggtctgaaaaatccattcttgattttataattataagatattatacctataatgagtaacaatgatattccaagagcagactgattaacaaatgatgcaaggattaatcccaaactaaacattaggatggtcaaaagtaatgcatttgtttttcttatactgcctgagggcagtggtctagtaggtctttctagtctatccactttgatatcaaatatatcatttgagaccatacctccaaggtataaaaaaatggaagaaaaaatcaaaattacgagatcggaaatactgtgaccagtcgaagaacttaagttggtggatactgctaaaaatcctacaataatgtctggtggaaccgtgaaaacattagaaattcgaaggagctttagatagggattttgaagcatgatcgttcatccaaatattttaagtaacataatctagattgaattaatataccttatcgattctaaagcagcatcaattgggttagtcttataagggtagagttcgacagttacatatccattatagcctatttcgaccattttcgcaaaaacagatttgaaatcaatcgatccatgaccagggatcaaatggaaatgttttctgttttttatgtcggccatatgaaaatgttcgatataggcttgcaatttgagaattaaagcacttgggtcctcattcacacagtaaaaatgaccaatatcaaaatttaatttcaaaaattcagaatcaaattccttcataaaatgcaaaaattcagtcgaagattcaatcaataattcaggttctggttcaattaatacctttatctgctttttttcagcatgaggaagaacatctcttattcccgtcgcaaaaagatctaaatacttgtctctttttgtatgcacctcgattggtccccctggctctatagaaatattttttgcacctagtttttcagctaggttaatgcaatctacagtatgttttatgcggagctcacggacgtcttctgcattttctatccaggaaggatgatatgtatcacctaaaccaaataaagtaaaagcatttagattggaaatttctattctattacgaattagcgaattactgatttccttaattttattttcattcaattttggtggatatgcatgaggaacgtcacacaatatctcgacaccatcataacctattttggaaatttcttctattgattgggttaatgaataattggtaaaggcgttagtgctaaaagcaaacttcacaaaaaaaattattttcattgggttaaatagttatgtagtaattaaggtagagtatcatctttgaatatttagacccatatttgctcctgtataaaatagattatctaatattttgtaaaaggtatagacataaaatgagagttaataaaaccagtgtttaattaataaaattagtgaaaaatattacgataccacaatactgtgaggatcaagaaattgatcgttattgcttcctccggatccccatgttgtcaagaattcaccatcgctatcaaatttttgaactctgaagtttagttgctcaactacataaacgtttccttcagaatctaccgccacatcatgggggctagctagttgtccgctagctgatccttttgatccccatgttgtcaagaattcaccatcgctatcaaatttttggattcgactattgccggcatctactacataaatattatcatttttatctatgtccaggccagcaggcttcttgaattgaccttcattttcaccagtaataccccatttagagataaagttaccttcgctatcaaacttttgaacgttattattatcagtatctgtaacatatatgttctccaaagaatctatagcaactccttcaggggcattgaattgaccgtcgccagtaccgatggaaccccatttatagaggaagttaccttcgctatcaaacttttgaatattaaagtttgccatatcacttacgtaggagttgccagcagaatccaatttgatggtatgaggatgcatgaattgaccgtcgccagtaccgatggaaccccatttatagaggaagttaccttcgctatcaaacttttgaacgttattattatccatatcgacgatgtaaacattcccttctttgtccacatctactccatgaggtactccaaattgaccatccgctttgcctttggtgccccatttagatataaagtcaccttgattattgaatttctgaactcgaatattagcatagtcgaccacatatacattaccatcactgctactggtagtaggagcacttttttctccaatcccattacctttggaatcaatggcagatgaaattttatctttttctttagtagcagatttttctaacggattctgaaatgttggttttattatttctttcacttgagaatctactttttcatctatatcacctagttctaaaagcgagccttccatgtttgatggcatgtctgaatatggagtgctaaaggataaagatggtaattggaaatcagtgctttgtgcaaaaatatcatcataaccgaataaaatcaagcttccacctactatggaatatagaagtaacaatgataccagaatattcacaaggatttactgttaaatttattattatatgattgggaataaaacacaattattatccatatgacaaattttcgataaaatggattatttaaatgagttaggagattttgcgctaacattctaatagtcatcatttgatgtctttgaatgttattgaaaatcgcatgcttttagggatggtgttttcgtataggtatttgaaaatggttgctatgaagcacatgagaaagatgtttttttcatcctagggattagaaaaacggtatataatggtgaataagtctcgacagaacaatgttaatttttcttttagactaagaatctaattaacaaaattgagatgcagtagttttgcaagaacaatatagtttggatctaaggcttaaaatttaaacaaatagattctgataaaatttgtattaaaggaattaagagctaatagaaattcggtattagggaagaaaatagatcgaaactaaatcctgatgattgtaattgtaattaacatttgatgcagtttgaacgtagttctggatagcatcaaatccaatcgaatgggcagacatgcttccactacctccacttgcaatgatatttaacataaatagtgtcagtataaaaccagctactacagcagctagaattattatcttaaatttcattgttccaagtgtcattttacttttctggtcaggagaggatggtgtagaaactggagcactaactgtcccattattggcgggagtagaatcctttaattcttcttggagaactcgcattctctctgcatgcttggatgtattaagcactggaacctttttaaccatcgatccatcaatttttgatctgtgtatctcataaagtattagatttttcccttcctttgacctctgattaaataaatctaaggcctcttcataatttggaagttctatggtagaaatatttttaaatttcccaacaatttctattaagtatttttttgttatctcagtatcatctttagggtccaaattagaatcactattatttttatcatcgatcccttccatttttcattttcctaccttgtctaatataaaactaaatatatctagtatttacgctaattggattaaaaaaattgataattgtattcttgcgtgagattgggaagaatggaaacaagataaaggaaagattgtatgatagtgaaagactgcatatctagagtcaacctgcagtattgagttattcggaagataactgaaatgatttcaacgatattggtcataacgtcatagccattttttctctgaagaaatggtatcctttcaaacatcttcaaaatgaaaatagtagtaaaattgttaagatcaaataataaatttttgcttattgaaggaaggttttactcaaaaacataaaaatttagaaaaatattaacccatcaagagtatgcaaattataattgttcggctgctggacagatcttcttaatcgacctatttaatgcttatatttacaaatgctgtatagttgttaatatggggacaactggcgaaccagctaacaaaccatcttctgataatacatgccacctttgcggaattacatttagaaacaaggatgaaaaagaagagcacataaagcttgaacattcagaacataaacagcctagtggagtttcttaaatttcatcctcatattttgattattgaaataatttattttttcccttttaggaagggccaccttaaattaagaatttgaacaaattggtggagatgagactccatatgaagacttgaaaggttaattaaatcgataaaattgaggatttatctatattatacctttattccctgagctatcaaatccttattgtttaatttggtaaaaaagtaaccagttttatagtttattggactaaaacgagcatgaaaaagcaaagaaaaaaaatcaagttaggtacagtaggaggtgaagaaaagtcattacaaaaaaactcaagtattgaaagacagggtttaaaccccgtccatagcaaaagacacgatttgcaaaccgcagacgaaatactgcaatatatgcaggaagaggaaaaatactaaccaaaattcttcccttttttagtgaatcggtaatatcccctcccctctaaaaatgtagtcgaactaatcatattcacaactttttattttttgcaaaaatttcctaaagagaatcgcgaattacatcaaaattgacgatattaagagaattattagtgattcattatttcgtaagtgatacccaggtcatcatctttctcttcgataattatcaaaaataatataaaaatcaaaattaagtcaaataacctttattcgtcaccgttgttttcctttttattgttttcctcatctttgtttcttattattagtacattaaagattattggattcagtcccgcagcagtcaacaattttttatttatttcttgttggagatgtcgggttacttcaattgaaaaagacgtttgtataagtgattcagattcgttactgcgtcggaataatattcttccaactcctgcttttttacctttactctttcgatttgtatttttagattattagaaatggacgtactctgattaatagccaaatgaatattttttaaactctaatttttctataaatcgttgccagtattcgttcccattaagggtaccatttttaattacaccgttaccattctttctaagtgcaagatcatcaataaaattggaattcttgaaagatagcaccaaactatttatgttaagaatgtcttcgtttgttacaccacatctgttaagatggataatggttaggcttacaacgccctgtaattttaaataccattcatattctggaacttcagcctgaagtttctccattcttgccttaagattatttattgtgctttcaaatcctagtttattatcgtattgtttttccacatcgttgagaaatctgggcaatgcttcccagtcagttattttgttagctctagagatttctcttaatgtgtttaatagctttttgagttccttaagtccaaggcctctctcaagtaattccttataggtattcaaggactgggttgaatacctaaggttttcctgtagagagtcaatttcttcgaggaggatatctcttttgtgtgtattcaaatcaattatactttgaactttctctttctcttctctcaatgattcgatctgtttataatctttgatattatcgagcacattgtagtgatatgtcttgaaatctacaattgcccttgcaaaggagccgaattcctctccgatatctatgccgtattcatattctagttcttgcataagggacttataccatgaataatacttcatgatatttcgctcttttatcatagttttttctaggttagagacaatagtgttcttgtgttgaattgcctttttgatttctctcgaaagtttgatccaggcttgttgcagtctttgaaattctagcttccccttttcaagataatgtcaattttagaaattaaggatatttggttttttttgatcattacgatactattttttggaaaatttgttgcgtcatcgataggtgtaccgtcagcattcgattcaattgtattggaattgaaggcaaaaaagccaaattctaacaagtcgtccatctatcttactatgatagcgggatctatgatgaattttacaattatcataaagattacctacaaagtgataaaaactgtctctgagggttgcggcatctctaacagatttttttccagcactttcatcatctgtaatccctgtattctcctccaggcgggtatatttaaaatgagtattatcatcaaaataaagcgcctgaccaatatctaattcgtctgagaatccgaagctagacaagattttgataaatttaaccccttgaacacattgatctatggtcaaccctgatttggttacgaagacagagaattctcgtatagaatcaatagctgggacagcaatccggtccttccaccttttaataatgttaaacacggttccctttgaaatttgattctgtttcgatattttttcatagaaatttcaattcagatatccttctataacggatttttctgatgctttcaaatcgtcactcatataagttgacatttatttaaagtattcaaattcttgttcaatttgttcaaataattacttaacctaaaatctatagcaaagcagaggattgaagcccaccaataatacttgcagatcatatcaatatgaaagtctagacatgttctctcctggtgcctacgcaatgattattacattactaaaatcggtttttctactcttgacaaaataaagtaggatattgccatgtaccttattatctttcttggaaatttagcttttatcatggtaaggatatttgactaaaccgacatcaatatatttaggcacaagaaaattaaatatttgattttgttttttctatctaaatgattaagctgttagaggagtaagatggatataatctgagaattcaacgagtaattcccatcaatcagaaaaaagtgatgaggtaaaatattaccagtttgtttatgcttgttgacatttgatatatgggaattaattatagtaagattatttcagaatctgcttaaacaattcacttatacaatactaagaacatacacacatgaataataaaattcaattatcgatcttgtcaatctttattgcagcagcattagtgggttcaacagtaacatttggagataatatggcatttgcaaccaaaaaaagtagcaacgacggagcacaatttttaggccaattatcagaaacaggtcaattttcagaatgtgcaacagacaacaatacgcttgcatcatgtaacaacgtaggcctatctataaacgcacaagatggtaacaacgcagcaggccaacaataaccttttattttaaattagtattgccacatcttatttttttaaacccaaaaattttataatagaatcaaaatcatcaaaaatagaaaatcttggatatacaattagaatatttgaaataatagtattagattgattgagttctatcaagtttatcagtaattcaaccgccagaagtaagtttctttgagagcagtcccttattagtgaataattagttaggagttacaagatccctttttcattgattacctaatacacggaaatccatttgcttagtcttttaagtgctatataaagaaattctaaaactattccataacaaattaatgaatagaatgaacagaaataattactctgataatcttaacaaattgttatatcatattttcataatatacaatataagactaaaatgttaaggtcaaagcatacaaaaaaaactgcactattagttgtagcagtatttgcgacagtattgattatgggtccatctatatccggaataaatagcgtattagcgaaacaaaagtacaatgattgggaagactgtagagatgatcacagtaagaactggtgcaagaattactttaggcaccataacgataataacaatggtaatggtaacaaggcttctcaaggattaggtcaatcacagtcctctagtcaaaattctcaatgtgtttccggcggcagtactagttcttcatgtaacaacataaacgtccaaaaccaacagaacagtggaaacaatgcattggcacaagatggaaatggaaagggtggcaacaaagctagtcaaggaataggtcaatcacagtcctctagtcaaaatagccaggttgtgtcaggcgggaatacagtcggttctggcaacaattttaatttccaaaaccaggtcaataccggcaataatgcattagcacaaagataagcctagtctcatctccttttttttgaaaaaattaatcctttttgaggaatatcatataatattctagtttaaagactgaacacatcaagccaattcataaaaaaacttagatacaattcttctaacaaatttgaaattttactcatgtacttctaaataggattgatcatatcattaagctcgaaaataattaatttatcgaaaaaacctcacaattcaaatcgctgataaatacgaattgattgttagcagataatttattaatggctttaatggaagtgattaagtagataaattagtaactattattaagcaatagacttatcaaaattagggaatcaagtttttttaattcttgtttctatccatgtccttatttccttatttccttatttccttatttccttatttccttatttccttatttccttatttcctattttgaacattcaataaattcaaattaaagcaaaacatcagataacaagattaaatccggaacaagtctgagttttggattgttttatttccaaatgtcatcagatttatgtgatagaccaatgcgattcaaaaaaaggttttcctaataatgaattatttaggcaacagaataactacaatttaacattttgaggctactcttgataatcaagagcaaacttatcaaattctagagctgttatcaaacatgctctagctacggtatggacagcctgcataaataattcccgcgtcaggttatcaaagaacaaggggtacagcaaagtgagaccaatggaattaccctcattgttagtttgtaatgaacaaaatacacccaccttcagtaaatccatcgtcaattgtgtttgaaaatcattaattacatcattagccctattttgtagaattttaccgtcctcagttagaagacgaggtctagatatgatttcaattcgccccatgtcagttttataaagataaacactgattttgaaatcttcgaaataactcgtattaataatggataccgtattatcatcatctaatgtttcgtccacgttacaaattgggtcctttttgagccaatctactattttctcataatgtggattaacattttttgcttcagacattattatagtatgatattatactatattaagaacttctatttgtattgaggctagctcccactctggtatacttttttttgaataacaaacaaaaattgtcacaagtgattttagaaacccccatatttttttttagttcccacactattgattcttgatttcatttacttggttacagaacatttatgagccattagaataaaattagggatctaaggtaaattctttccgccttttttatttagggactaaaaatattgattttttgttgtgagcgaattcatgttgtttctaatgtatgatctttatttataagcaaagatgtgaaaaggattgaaatatttctgtattgatgcaccttatgcaaggaactggacgtaagcgaatacaggtatacacattgcattaattgtgatacagtatacaaatttttttgtctaagggattgaaatcatcatatatagaaccttcgaaaaataacaagtcaaaaatagtatctctacataataatttgctaaatcatagactcctttgcgatagtgtattgttgaaatttctctgtttgataggattgacttcaataaaaaaaatacaaccaagaagaaatatcaggataactctttctaaattttcctactagctctttggcaatctattgcaaacccataataatgttctaaaaatgctatgaatttgttcaacctaatgatctaaacatggatgagcgatgaagatgaataagatctcacaaaactttcaagtccatctcggagatctattcttggatagttcctaacaagtttcaggctttagatatatccgaaagatttctaagaatatctcccgcccgagcgtcagtgtactttggataaatttctttcttgccaaatgtgttctttgcaatctgaactagatctaaaattgaggtaagaactccggttccgatattaaaaatatcacccacagggttgttagactccatagagagaatattggcatatattatgtttttgatatttacaaaatccctagtctgggacccatcgccataaataataggggctagattgtttatcaacctatcaataaaaatcgttattactccgctatactcattattactttgtctagaaccatatacattgaaatatcgtatgagacgcattttagcccataagttttccaataaccatgaagatagttttccacggatatctttgaagccccatatggagaggttggtttgcaagctaattctacccttaatacatcgttgggtagatccccatagacagatgaggatgatacaaaaaaaatcttttttacaccataattcacacagaaatcaattaccttcatagggatgctacgtttgaatcaaatacattttcaggatttttgactgattctgtgacacttgttattgaagcttcatgaaatatgatatctaaatcctttaaatctttcaaaaaatcatgaatttgggaaatatctccacgtaaaatatgcaactttgggttcgaaaaatatgttttaaattatccaatttacctctagaaaaattatcaattataaatgtttcaaatcctctctttagtaattcatcaacattataactacgataaatcctgctccaccagtaacaagaactcgttgaattgatcccaaagctacatgtagactattcgaattataaaaacgtccttattcaggataaaataaattcaaatgtattaaatcaattatattttagttgggttattcaaaatgttctccatatttataatactaatagtacaatcatgtaaaaattagacggtcgatctatcttagatttggtaaaaagatcgtggtttttttattcttattcatgagttaaagttgatttcactttataaaattgagggatgatcaagatcaccattttattacataaacacatctagagactaaagtcgttagggtctccatgtaaatttttctgattgtttatagaattcatatgcatttaggaatgtaactctttcaatatctagtgaagaacatttattttttctcatttctcttgctgtcatgggtacacttagtggatcagatattccccaatctgctgcgctattaaccattatgcgctcgcttccgtttttatttactataccgatgacccgatctggagatagcttcgaaaccggataaactgataggccagcccaagcacccatgtctaaagtcatcttaattgtctcttcggtattgtgatcaatcagtatcttatcaaaatcataatttccattctcaaatattctcttcatttttctcataccttcagccttattttgatgtggcaaatgtatcatagtaagcatactttcatttctacaggcttccaattgcttcacaaaaatttcctcctcaagtacgttgataaggttgtatccaatctcaccaagagcaactactcgttctctttttaggaattccccctctatcatagcattatatgcgtctattgctaaaggtctttctaccgattcttttggattaactgaaatgcaggtgaagtgttctatgccatgctctttggcccttttcgtttcaaaggtgatcatgtgctcccaataatctataaaagtaccaacacttgtgcggggtgctcctagccaaaatgatggctgaactataacctcgataccggcagttgacattttatcatagtcatcagtcgtccttgaatacatatgaatatgtgggtcgaaaaatcgtgccattctatattagttccaaattaaatatatatacaataatgacacgagtagatataaaaaattgatctaccaatgaatgccgcactttactatggacctaatgatataaaaattgaaaatatagatataaatacgaaatctcaggacgaaataattttaaagattctaacatgttcggtttgtagctatgatgttaggacattcagaaatggaagttttaaggtaactcctcctgttattttaggtcacgagatttgtgctgagactctttctgattatagaggaaaaaactttactatcaagtccaattcgagagtatccatttatccaatagtcccatgttttgaatgctggttttgtaagaataggaaatacaacttatgttcaaacttaaaggaaattggctctactattaatggtggatttgctgaatatattaaagttccaactaaaatatttgaaatcggaggaatagtaccagtacctgaagaaatatctaatgaggaggcttcattgattgaacctctggcttgttgtataaatggcattaatcagataaaaaatttggactttgagtccatcataattattggtgatggtcccattggactcatgcaattaatgttgttaaagaaaatattccccaaatcaaaaataaccataattggtaaaattaatcatagattagaatcggcaagaaggattggagctgataaaatcatacaaatcaaggataattatttagatcacgatttggcctcaataaaggaaatgaatggacacagatctccaaatttagtttttatttctaacaataatccaaactcaataaatctcgctttaaaattagtcaataagaatgggaaaattatgattttttcaggtataaaaaagatagatgacaaagggacgaccaaattaattagtatcgatcccaactttatacattatgaacagatatcaatttatggtagttttagttcaaatccagagaacttgcgagaggcaatgagtcttgtaagtagcaatgaaataagattgaaggaattgataactcatatttttactctaaaagaaattgaaaaagcgataaaaacggccgagtctttcgagggactgaagtcaataataaataaattttgaatcaatatatttaatgtagtctctatgagaatccctgaatcatattccgattattcctcaaccgggtatattaattttggcattgaaaccatgaactagtcctctcacataagaacgcatttcatactgttagttaatgaaaatgggccagatttgattcaaaggtctatattgagcataattggaagaaagaattatcttttccctttagatcttattccataataccttcttacatgaggtctgtacatataataaatgatgatagcgttatacagtactccaaaaatggaaacgaactgtccatttacaacatttagtaaatacccagcagcaccaaatcctgacaatactagcagtagtttccatgaccagtttttccgcatatacaacccataggcagttagtaatgatgctgctcccaaaattaacaaaaatgtgggtcccataagataaattccgcctagcggcattaacagattaaatgcataaatggacatcattacaagcaatgcaccactaattatcgtaagtatagtgattatcaaaattcctctaggaagcttttggtttattttttccattttttaatctaaaagttgtgggaatataactttttaacaaatgattcaaaaatcttctaataaattgataataataataaatcttaaataagaataatatcacaattttttttatggattttaataaaaaattatacccgattctaacgctgattattatacttccgatttctgtgatgacttcaaatatctctatcgttgatgctcagagttttgtaattcccgaagaaaaacctacaatttcaacaactggaagcgcagaaaaagaaattccttctgatgagtctagaatatctttggcagtcgaaaatattaatgcaaatcccaatacagctagaaaaaataatgctgacaagatgaatacaataataaatgtcctaaagcaagccgggctttcagatgaaaacattactacatctaactaccagataacacctaattacgactatgaaaacagcaattatgacagaataatatcctataccgctcttaataaaatagaactaaaaaccttagcaaatgcaaatatctccaaattcattgatctagccgttaataatggtgcaaatagggttgaaaacattgactttgtaatttcaaagaaaacattggatgagaatagtatggaattattaaaagatgcttttagaaatgccaaacaaaaagccgaaattttgggtacggaaggcaactttacaatcgcaggagtgaaaaaaattgatacaagttctgaaggaggatataccccaccagtctatttctacgacaattatgctggagacgctgccaaaaaaatgccgtcaccttccactcagataatccctcaaaaaaaccagataactgtaaccctgcctgtgatattttacataggtaaccagacccaataagcaacgcgttattctctttggtcggatcaaacttgggtaatgaccttgatattggagaattcgggccaaaataatatttcatttccattatccgccggttttagtccgcgaggtaacacgggaatatttgaaaagccgataactaccaactaaataaattactatgcaactccccattatagaaaaaatccatagatttgaaaaaaggagaaaataacccgattctcttagatataccattaaaaaataaatagtagatttatcccaacaatcagagtctatgctattgattcatttttggttctttcatatcgataggttaggtgacgactcaagatgttctttttatacgtagaatgaattgtatatcaaatgggcataacaatgcttacagacaaaaatacatgttaaaaaacgaccgtagaatgttttgtaaatcgcggcaaataccacagcctaccatacattaaagataatcgttccaacttcctagttgaaaaaaggatgtgatcaaatattaaataattaaattatattatttcccattgtgaataatcatgaataaaaaactcttagatattcttgtatgtccatttgacaaggtatctagtctcgagctatttcagtttaaggctaaagcaagatttgctagtgttaatacaatctcaaataacgagggtaaagatactaaaaatcccttaacaagtgagaatgaaaatggtagaaaaatgaacgatgcaagtacaagtccaataagtaattctgcttcagatatgaacaaaggggccactgagattgttgaggagggcctgttgctttgtaggtcatgtcttagattttatcccataactgaagagatcccaataattctaccagacgaacttagagataagaaaaaagacttggaatttttaaagacatggagtgaatcaattccgaatgatctcttaaagaatctaaaaccatggacagtatgaaagtaaaaaaagcgtatccggaaatctaagcttcaaattaaatactgttgccatatttctattattcatagaataacatcataatctcaaaatgcaactcgagaaaagaatgctaaagggataaagaaagactaaatctcacccacatcacaaatatttgtcaggtttattcatcgtgacgtttgttctcagcgatttgctctcagtgatcattgcgaattacattcaaaacctgacttaattttattctctcattttcaaaaatgtccttgtcatcctctttttcatatggaagttttaatagtctttgataggcttaagatgtgcttgccgtagttcttccttattcaagcataatgcttgagcggattctataaagtggtaagtaatatttctgttttttctgtaattaccaccagtcgatttggcttcaactaaaaacggtatttctgttttgattatgttcatacaaattgcaccgttaaaaaagttcaacttagtgtataacggtagtcaaggatcaaaattttttataccatttgataatacatccattattgcacaggatattaattctatcaatattcggcatcctagttttgtcaacttttcttgcatcttacttcgaaaacaactttcttaccatttcagcatccatcgttagtgccaaagaccaactaatgccatttgacttgaaagatatggttgatgtaggacaggctcaaaatgaatccgcagagaattcctcagatacaggtacatatgacgatcaagacaatacggtagattgcgatatgcctccatgcccaccaggacaagcctgcatacaaagctgcccctgattgtttgaatcctgctgcgcctacagaactttaatatttttgtaattgccaatcgttttataacagaatgtatcaggtgatacaggagaagactatttttcacaaaaaaagtggaaattaatgttcactttcatcacatgcacagtacccgtgtccaattccatcgcaagaatggatagattagaatccctatcagttaacagtacactaccagtagttaaaagcctgctaaaggatagttaaagtaaaggatcgaatggctatcaattacagcaaaaaaaaattgtcagctgaagcagcatttgttggtaattcataaattaagtaaatatctgaaatatgcattaattctagaactaacctgtactagtcaaaattagttaggattttgtagttttggtgtccaatgataggacctctagtaccgcacttggtaaagtttgtgcaaaagcctgagccatcacatccttttctacatagtcaacaatcggaagttgctctatggtttggacaactttatcatttggggctcgaattgtcaatccgtttagcacattctcatagacctgcagcaattcgatgttctgtgtgtcaattttacttgatagcattgaaaaaaagtcagagacagttgtatcatcgtttttaaatacaacaatatattgcccggggattacatcatcatcaaaagtcattgtatctgagagaaaggtagatggagcgtcagaataatcaccaactaatggtaaagtatcttggagttttaatggcgttttattgatatcatttgtattttcattttcgttaccataaactgagttcatcatatttgctggaaatggaagagatgcagaattaggttgagtagcctcatcattggactgtcctttgctattactgctataagaacgccctatatcagattctgaattatccttcccgccatcttcgtcggaatgggattgtggaatattatttgtgattgtacccaaatcaaaaatggatgaactatcttctttaggagaattattgtcaaaattaaaattaaggaaaggaatatcaggtaaacctatactaaatgcgtcaacgctttgaaatacacttgtgctaaaaatactcaaaagtactattaaagtaaggatgtatgatttagcatgttgacggcttttgctattcacatattagtatcgacggtagatcatttatgaaatattgaaaattttatcttctcttagtttcagatcttgattatacaacactcgacaaatatcaaatactggtatagttttatgatagataaaattactaatgaggaattagtttatagatagtatattaacttctggtatagttttatgatagataatattactaatgaggaatttaatttaactaaatagcatgacctaagataagtaattcgtaaagttcattatcagagtaacaaatatttttttcaaatctacaaaaccgaatattatataaaaattatattataattagagatattggaatatggaaaatttgctgaaagtcagatttttaaaaacaaaaagaggtcttattgttgacctaatgcgttgttaccgtcatttaagttaaatgacaaggctacgttgttacatgatgcagttgtatcgttaccagaaccacagcttgatgcttggaatgtttcggtatcttgacctattccttggaatgcttcgttagattttttcttctttttgtcaccatcgtgattatcaccacctgcgaaggccatgttatcaccataggttgctacagagccaatcaaggctgctgcaataaagattgacaagattgacaattgaatttttttattcatgcaagataaagtatcgtattatataattggattgttaaatcagattctgaaataatcttactaaatatcattctttaataataaatctcgttaagatttatccaaattttgctagttgatttattgttatagataccaatgattcccaatctccaaactcaaatttattgatacagattagacagacatataatgactaaaaatagtattttgaaattgcgaaaaactatagcaattaagtcacggtgaaaaaattaacatctcttttttcctcagaagttgttgttatcatcatatgacttaaatagctgcccttttttgatttaatattgaacaagaatttcctacttgtgtttgtattaatattatcagcgaccgtatacattaattattcatcctggtctgacgtatacgcgcaaaataatggctctgggaatgatgatgataaggatccaataatcaatgttccatctagtccaataatcgcggaagcaacaggaccacaaggttccgttgtttcctataccgtttcagcatcaaatgctaccgggactcctctagatgttggctgtacaccacaaagcggaagcatgtttgccataggaacttcaacggtagattgcaccactgtggatgaagcaggaaatgatgcaagggcctcgttcgaggtattagtacgagataccacccctcccacaactgagcttggagttgttaaaacaggttggatgggcattctagttaacaacgattttacgaattctgatgacattggatttgcattttcaggttctgatctagtaggtgtcaaaggctttgaatgtaaactagatgacgggaattggcgtccaagtacgatagattaccatggaaataataaatctggatgttattacatgaaccttgaaacaggagatcattcatttcaagtcagggcagtagatacctcaaacaacaaagatccaaacccccaattcttttcatggacaatcatatcccttgaggatgccattgtaaatcttcgtgatttcgtatctacaataattatgcctcctaacttacaagaagaattatcagattcattgaataatgcaattggtaatgttcaagatgatgggagttatgatcatctaatttgcgaatatctagattcgtttagttatagtttttcaaaagcttccgtgttagatttatttaatcaagacgttactaattttgttgataattcattcacgtcaattagggatagaacaggctgtaacccacccattgtgagtttagaaaatgagatcaccgtcgatgaaggagttaatggtgtgatattggacgcatcgggtagttttgattcaagagatgggaaaagtctagagtatgaatggagtcaaattgcaggtatgaaggtagatttgttggacatttataagtcaaaggcatcatttaatgctccaattcttggaggaacttcaaatcaagttatgtttttcaaagtaaagataactgacaaaaatgatttattctccgaaaaaaccattaaagtgatagttcaaaatttgcagccagtcaacgatccaccagtagccgatgatcagcaggtaactgcaaatacggctgatccaacagagataactctcacggctacagacccaggtggcaatgctttgacatatgctatagtttcacaaccaaaatcaggcaccatcacagaccttgacgaagacacaggtagcctagtctatacatctaatgccggatttacaggacgggatagttttaccttcaaggccaatgatggaacagttgacagtaatacagccactgtagcaataacagtaagcgcgaccattgatccaccagtagccgatgatcagcaggtaactgcaaatacggctgatccaacagagataactctcacggctacagacccaggtggcaatgctttgacatatgctatagtttcacaaccaaaatcaggcaccatcacagaccttgacgaagacacaggtagcctagtctatacatctaatgccggatttacaggacgggatagttttaccttcaaggccaatgatggaacagttgacagtaatacagccactgtagcaataacagtaagcgcgaccattgatccaccagtagccgatgatcagcaggtaactgcaaatacggctgatccaacagagataactctcacggctacagacccaggtggcaatgctttgacatatgctatagtttcacaaccaaaatcaggcaccatcacagaccttgacgaagacacaggtagcctagtctatacatctaatgccggatttacaggacgggatagttttaccttcaaggccaatgatggaacagttgacagtaatacagccactgtagcaataacagtaagcgcgaccattgatccaccagtagccgatgatcagcaggtaactgcaaatacggctgatccaacagagataactctcacggctacagacccaggtggcaatgctttgacatatgctatagtttcacaaccaaaatcaggcaccatcacagaccttgacgaagacacaggtagcctagtctatacatctaatgccggatttacaggacgggatagttttaccttcaaggccaatgatggaacagttgacagtaatacagccactgtagcaataacagtaagcgcgaccattgatccaccagtagccgatgatcagcaggtaactgcaaatacggctgatccaacagagataactctcacggctacagacccaggtggcaatgctttgacatatgctatagtttcacaaccaaaatcaggcaccatcacagaccttgacgaagacacaggtagcctagtctatacatctaatgccggatttacaggacgggatagttttaccttcaaggccaatgatggaacagttgacagtaatacagccactgtagcaataacagtaaacgcaattgatcttccgcctgagcctgagcctgaaactgaacctgacaattcagctgaagatagcacacctccagactcaagtaaagatagcacacctccagactcaagtaaagatagcacacctccagactcaagtaaagatagcacacctccagcttccaaatctaaaagtctgaatagtacaaatatcagcagtggtggtggccttttttctgatgggttccctggatttacagatagtatgaagaatttattcggcaactaagtaacaaaaatacatggccaagtattgattgataatctagatattagtattcaaacaatctatttttttaattaaaagattcaaacttattttattttttgacagatgactccacctagtataaaaaatttagaatattgattgcatgttagctaggaaaaaatcatgattaatttgtccgttaaaaagcctaggtcggtatccctctatattactatggcaaaataagatagtataagatttagttagtattgtgattaattaattaggtcataatcctataagaaaatgggaaaattgtatcataatcgactatcacattgtttattaatccttaatttcataccagtatttcacttagatcaaaccattattggaattaagaaaaaagatatataaagtatttagcgtttttttagatataataaatttttgtaagaaaaaaagtaggtcttttactcttgacctaatgcgttgttgccatcatttaagttaaatgacaaggctacgttgttgcatgatgcagttgtatcgttaccagaaccacaagatgaatcttgaccagttcctgaaaattgttctaaatcttggagtgcttcatttgattttttcttgtttttgtcaccatgatgattatctccacctgcaaaggccatgttatcaccataggttgcaactgagccaatcaaggctgctgcaataaagattgacaagattgacaattgaatttttttattcatgcaagataaagtatcgtattatataattggattgttaaatcagattctgaaataatcttactaaatatcattctttaataaaatagtattataaaatttttttgtaaaatatcagcataattggttggacatgaaatactgttaacgatgctatttcatacatatcatagccatattgcaaatatcgctcatttattacaaataccaaagctaatatacccaaaaaatgccttttaaagccgcattctgatgaaatttatttttgtctgtaacaaatgaatgactttactaaaattgacctttgtattcttaaatgaattacatggaatacaaactttttatttctctgctatagtacaatctgtaaaaacttatctatctctaaaagaggaatagaactgggatatggacaaccaaagttagacaattgagaaatcaaaaaaaattatgatcctaatatcataccctcggctaaaaagcacttttaaaaaaaaatgaatcttaaaattgctaactctttaccaaaggtcactaccctaattatttgctctcagtgagcctgtgccatttggatatagttttacattagttgacgtatccgagaatattacaccaccaatttcaatattttctaccagatttggactgttaataatggttttagatccgtctgcgttctgagttgtatttactggatttgagaatacttttatgtatacaggtagagcgctagtggttgaattgtctaatttaaccgtagctctcattgatataagaatatcagtaatagtgatttcatcactagtatcatttaaaaattcatatgttaatggaacgccgttaaccaatagcaatggtttgccaacaatcaagtaatctgtttcaagtcccactggtttagatgaaaaattagcaacaagagttacattttctgtccctgtcaactgtgtatcgtttacaattgacccgctagtcccagttacattggttaaattatccatagtggcaaattgctcactcaacggagtgttattaattaatcccaaagtagaattagagagattgagattaaggtcaagagttgatatatttgtcagaatagatgaagataaaagagaagagtttgtagagtttgttcccgacaatgttacggaagtattttcgtcagtagaagacacgcttgaaaacgctggatttgacgatgcaagcattaaaactattgaaagtgttatgcatgaaattatgctgtatttagttccggccaaactatataaatagtgcattaaaaaaatacatagatcataacataattaagtttttacataaaaagtatcccaatccagtattaaattgtgcatttgaattaggtttctcaattcctttaattaagataaattcaacaaaatgttagatcaagaaatatgcctcataaaattaaactaaacaagaatagaggtagatcacctcttgctttacttgcttgcttgcaatacaattgaaactttataaaaaattttgcataagaaaaaatgtgagtaaagttttcaatatttctaaaattttggttgggattgacggatctgagttttcactaaaggcccaagaattctcaaacgacttggcctgtaaatacaattctcaaattatagcatttactgcatttaatattccaaatatgtacaagatacttgaaaaaaatggagaagattacaatactatctctattgaaaaagaaattcgaaaatcaaagagattattattagatatatcaaaaaaggcaaaagaagaaggaataaacttgaaaacaaaattttacgatacaaaatcatccccagatcgggcaatgaccgaatttgcagaaagcgaaggggtaagccatattgtaattggctttagaggtagatcctttgaaaatctattaatcggtaacatagcaacttcaatcgtaaagaattctaaatgctcagtcactataataaagtaagatgattatctaattttctagaattaaggctattgaaaacttttgcaagccaagcgaggatcagagaactcttttaataattcaaattagttataaagaggtagggattaccggacgctataatgcttgaaaagtattcaaatcatatttatcacatcctcttctagactcatactcagctcaatacgattttaaagatctattgtacccctatggatgctaattattccctattctccaatcctgcgttgaattaaagaaaatcgaaaaaacaattttaataaggcaaaatagtctaagattaatgcttcaaatacagtatggtagtaaccttatcagtttaggattggtaatagtggacatgcaaaatgggttcgttagcaaagatggatcctacgataaacttggcatgaatatcgaaaattaccaacaagttgttccaaatattaaaaggttgattagtttttgcagaaatgaaaaaataccaatcttttataccgaagcaattagagaaccaagcggaattgatttactactccacattcacaatattcttcccagagcaagggaggaaagacttcaaaacaaaaagataccaatttgcatgagagatacttgggatgcacacgttattgatgaaataaaacctacccctgaagatcatgtcatcctcaagcgacgcgattcagcatttcaggatacggaattaagggtgtggctgcaaagtatccacgtaaatactttaattttctgtggtatagatacctcgatttgtgttgagacatccttaagagatgcttttaatttaggatatgacgtcatattggtatctgatgcaacagcttctggatcaaaaaaacactatgaaactactattgaaagagtacgcgactactatggagttgttatcaacattaatgatctaaaaaaaatgattcagacacttaatgatctgaataaggatgaaacgcaatcaaatgatgaagaaaacgaaagcataagccaattccttgaaaagcataatttgataaacgtaagaaaagaaaagaaatagtatcgaattcagttttgagtattagtagtcctccgatttgatgaataataatatcacttctacatcttcttcaaaccaattttggtattccctcaagcagacagactcctagcctaattgacacgaaaaaacatctgtttaacaggttcatgggtgctcaagctcttagctgagcgctgaattggattttaagatttcattatccaaaacggagttacaatagtagtaaactccactctgataatcattagatagtatatgtttgaactgtttgctctttgtcacctcaacacttgcaaatgctaaccccacttcacctttgataattatcccccgatgtaactatccgggctttagatttgtttttaagaaaaatcatagatgataattcacataggacaatcttagtagatattgctataaatattaaagtattgccaaaaacgtttgatttttgatttgccaccatgagatcgacttgagatcctcaaatggcaagataaagaggagtgaagatgatttgcattttgctgcataatttcccagtttagtcaaatgggtgtgcttgctattgtcctactccttgaattggcctcccatttatgatgataagcctgattgacgattataatcattttttcaagttcccggaatttcaatgctggatataaggtaacgaccatgtttgctaagggttgacatcaatacatccaatcaactaaatgataccaactaaaagatttacaattttcgcttgaaacagactggcagaataacttatccaatagtctttcagaattatattctagcataatcattaaaaaaatttaattaataatttcactttaatatagtaatgaaattatgttttaatggaacagctcttaggcgatctccttcagatagaaacacaaacaaaagcataaggattagatcattatatgcattcgctttattaatcttaattggatcagttgccattttttggggtcttaaggacgtaaatgctcaaagcgcacaaagtggtcagtttaggataatagttcaagtccaaaatactggcaatttggacgaacatggtgctatacatgttgctatagatggttcacgaaatcctcaaactatgtctggtttgatctttccagggttacaaacaagctcatacacttttgaattcagttcttctgaagtgtcggtcggaaaaggctttactgcagaagtagtttacggagatgatgaaataaaaagagcatctgggtctaacagcgcctccaatactccagaaacggtgacattattaattccataattagaccttttttatttattaatctaacttcgttctaatgtatcttggattattttgggcagatttagatatccattgcttacagttaaacatacgcctaacaaattaagattctaaaaaagtaaatatatccagagtaagtagcggcatagggaatttatatacatctctcattaatttatccctcctagccgattttcataatactttgagacaaatttagattcacaaaaagttgacaatgataatgaaaattttcctattattatggtttttaaagctagatgcatagaaaagtttaaaatgatttgtcataccatcttagatgaattctgaagaaataatggacacagaccctctcaaccgtcctgtattaacgtacgcacaccataattatattatcttagatgaagatacagacgcagcaaacgctgttaaattaatgcatggaaaaaaggccgaaaccattattgtaacgaacaaaaaagaagaatatgtagggattataactgatagtgatattttagataaaattgtcatgagaggagaagattctgaccaagtccccatcaaatcaataatgtcatcccccctcattactatctctgcaaaggcaaatgtaagacaagccttagaactaatgagactaaatcttatcaagagaattcctgtaaccgataatgtgcatattttgggtatggtaacccaagaaggattggcaaatgctattagaacttccgtcttagaacgacaatttagaagctatagagtggtaattagggaaagatacaaacccatttggggaaatcttggattcatacttcaattttcaggcttactttttgttgctccagccatcttagccacagcgatgggtgaagtggtttctgcaactggaattttccttggaattaccacaatgtctattactggattcatcctgaatgcctatggagaaaagacgccaatgaacctcagacaggcgtcaattctcatggtctttagttttgtattactaagtttttttggaagtatcccatacatgtatgtaaatccattcggtgagggaatagacccggtaactctagtagtaaacagtttctttgaaagtgcatcaggttttacaactactgggttatccatgctagtttatcccgaagatctcccagagagttttgatttttatagagcgtttacccagtggataggtggtttaagcttcgtatatttggtaatcacattcttctatcccgaaagaaagttggctcatatgaaaggaatgttaggtgggggaagtctgaggttaaaacaattgatacttacgattggagttatttttagtatctacactgtttccctatctattttattatatatttctggaaaccataatattatatctaatatttcgctaatatttagcgcggtaacgggtggaggtttcgttccttcttctacatccttaatttctgaaaactttttagaattatttgtcataatggctggcatgataatttctgcacttccatttgcttttcattatgctgtttttagtaaggaaatgcatactacaaagatgcgtccagaagtaatcttatatttcggaattatgtttactgctattcccatattcacatatcttcttttcatgtcttatcccactgcaaatatcgtaactggaatttttcacactgtaagtgctgcatcaaccacaggctttcaatttatagatatcacacttttatctgatgacggcaagattttattaataattgtgatgctaattggaggaacagctttctcaactgcgggtgggattaaagttggaagaatactacaaatagttcagaaattgacaagtaagaaattttccgcagatgttacaacgagatcaatttcagcagtttcttctaggtatgacaacgcatatcacggctatgaaagaaaatccgaaattcacaaggaagaaaaaacgtttaacgaagcaatcctcgttatattcctttttatctttatgtctttttttactggtacgcttttatcatttcttacagaaaaaaattttttagattctctatttgaatcagtatcagctttaaccactacaggattaacagctgggataacaaacatcaatgctgatctgttttcaaaagtgttactaataattaacatgattataggtaggtttgaaataattgcagtaatttatctgtttttagaaatttcgaaaataaaaaagcattgatttttttatgtgtatagaaatcctctggttcgacatcttttacttcttttttcgagggggtaacttcaactacggcccaatgtactttaaaagtttactctatttgataaaagcccatttagatagcccttaatgcaacattccctggaattattagtcggcgctagttcaaataattctgatgatgcataaggaggaaaagagatatcagacctaccatccggtcactaatataataaccaaaatacgctaatagagatacattggtccttctaaaactgaaattgaaaattagtttgtcttttcatgacctgattgaatattctaatttggcaatatcactgggaaggaggggtagagtactatggactcttcctaattgagcatttcaaatagaaggaactattatatttaaggtaactataacaattaaaagcttaaccctttttgtacaaaatcaatcattaattcagccttagttattttaatttgaattgcatgcattaagaggataaaccttagtgaatgaaatagaatggcgctcctttactacagaaaacaagtaataattttctattgaaataatatagtatatacttttatattttgaatttcattaaactacaatgaatacaaaaaattcattgaactttgtgtttctagcaggattattggcagcgacaattggatttctaccattgatgaattcaaatactgccctagcccaaactaattcaacaggtagtaccgagctcaacaaatatgactggtggagacgatatgatgatgaagaaagatagttatgccaacccaatgatgatgaaaggacatgaaaagtatgaaaaaatcaacggaacattgaacatgatgcaaacaatgtttcaagctattggagataaatttaatgtaacattaccacaggctatctccactgccgaacaatcagtgggtaatggttcttttgcaatgtcagccaatggtcaggagaaagatggattccttgtaatttcagtagttctagcctccccagacatgaaatttactaaagtgttagttgacccaggaactggattagttttacaaacaaagcctctttctatgatggaatggatgaaaatgatgcactctcaaggtcatgaagacaagaaaatgaaaggaatgcaaggtgaatatggcatgggtatggatagaatgaatggtggaggatatggtgaatatggcatgggtatggaaggaatgcatggtggtgaaggcgctcagggatcaggctggtaggaaatcaatttcagtaaatctacaaccatgacgtatttttttaattatatttaattatttttttcttagatgtttgtttaaaaacaaataggaattttttgaaacaaatcaactataggcttttgaatttatttttttcatatccaaggctataatttgattaatctcgcctcgtctccccaaccacagacattatattattagtaagataagatcttgatagaaggataagaatgtccgatcctggcaataatgaatcaaacagagatgctgtgacattttcggaatttgaaattgaaaaaatttcgaagttgtatcaaacagctctggatttaacctccgcaaatgaacaaggacctttaactgatttaagtccagaatcttctgcatcagacctcatcagcaaaaaacgccaagcttggcatgatgttcagaattatttggaagaattagggaaaaaatatgattatgatccggaaaaatatgttataaataagattactaggaagttagaaccttacaaaccaaaatcttaagatatttttttatacagcgggatcagatcttgctggtgtaccatggagctgtaacttctaacctctaacttgtattatgtagttcttgattcaaccatggttaaaaaagataatagattaagatctggcttgtaccctacttaaaggagaaacaggttatcctgtcacttgcttgaaaatatcttatgaatatgttctccggtctcgcaatcatcatcggggtcatcagcaaagatttgtaaagtgtatgcttttgatacatttgaaataacggtttcctttggaacgtactcagctactttaccactgaattttggctcgccggtagcggtcttgtgattgacgcattcgcctatttggaattttttgatatcaaaatgatcagcactataatacggtttgttcccatcttcatctaaggcgaccgatgctgcaaagatgccattattggttacaaaagtatatgcatagtaactttcatctccaccatctactgaaaatgacctaccaggctgaccttgtaattccatgaatgggactccattattgacgccaaagtcggtaataacaaagtcctctctatgaaatactgcaaacgcgtttggaacacaaactgctgaaagtaaacttagccctataacgaaaataactaaattttgcacaaaaattctatatttcttttgtatttatccttttatttgataatttctattagaaagtaaaaatatcgaaatcgattgtgtgattgaatctactatctgagaaatagttatagattcaaggagattgacaaaatgtttcgtgccttctcaaaagtttaacttttagaaaagttctttatgatttcaataaagcacctcgtacctttttttaagaggtcaagattagtgaattcatttggtgaatgcattttgtttggtaaaatagtgcttccgatgcaaattgaatctacgtttaggatatctttaaaaacatacatgggcccagtgcctgacgaggagacatttaaaacgacgccattaaatatctttgatgcggaatctacaattaattttacaaattcattatttaatggtgttctaaatgccggctcaccgcttagatagtgtatagttacatctttttctgaatatccttttgatctcaagtattttaccaatttattgaattgtaatttcggatccatatttgggactaatctgaaatccatcttgacggtagcggtcgagggaagtattgtttttactcctttattggtatagcctgtaaccagtcctgaaatgttgcaggaaggttctgtggcgagggctttctttatctcgtaagaagattgtccctttataaaacatgatattccgtattcctttttgaatgcttcctcattgaaaggttcattggcaattaattgtaattccttttcacttagagacgttacctcgtcataccattctttaattagaatttttccgtcattggggttatataacaaagacaataaatgaactaatctccaagcagggctctcaattgcaactgctaaacttgaatgaacgtcccgactaggtccatgtacttttatttctacattcaggatgcctttttgacccaatgaaattattgctctgtcgtctttatcaatataaccgctttcccagattaccaaatcggatttgaattcttccttgtacctttgaacataattgatcaaatttggacttccaatttcctcctcaccttctattaggaatttaatgttgcaaggcacgtctcctgtctcttgcaaataatattctacggcctttatcctagtaattagttcgcctttatcatcagaggatcctcgaccgtatatgtgattgcctattactttcccactaaaaggatcctcgttccacttttctattggatccactggttgaacatcataatgattataaaataaaattgtctttccgctgggattagattttgatttaacctcaccatacactatcggaggtattcggctgatagttctactttctatttgttcttctaaatccaagaataaaaggtctgttttaattccagcatttttcatcatatttgacaaaaggatcgaacactcctccagtccctgatttgttgcagaaatgctaggctgccttatcaatatttgcaagtcggatattagatcattcatttgatcatcggtcaaagaagcagggagtaatacattatccaactaattcatctgtctcccaataaaccacaataattaaaaaaccttccttgttcccatatcccgtctgactcatttaacacacattattatctattaatattttgttaaatgaattagaggaaaatttaactgaacaaaaagatagaaaatatgaatataacaaatattgtagaaaagttctaaagtaaaggggaattattttttgttttatcccaaacatgttgaatgatttcggatactgtttgataaacattcccattaaaattagattcccataatctggtaacgtattctccaggagaggtcttgttttctagtctattttcaagtataccaataaattcaggtccaagccctaaatctttcaatccttgtttggccacatgcaattgagtctttgcagtttctgaaatattgaaatgagttttagaattgtacccgtacggatcacggctagcctttcttctcggatagatgataatggtcgtaaaggttttccctccagaatagagcgatacaaaaacccgataaaaaactctatcatcgccacaatttcctttggggttggttgaacagacattattcttgtttcaaccctgtaataaggtgaattcaaccttatcctaagatcatcgtgtctatctttttcaagaccaaaataatcattagtattagcagaacctggtctggaggcaatgtagtctacataatcttcaattcggtctaaatattttgcaatggccggaaacccagaattttgttgttctgaatgatcatatagataaacacgtggttcataaagcgaaaatagtttgcccgcaaataatctactatttgaacctagcaatattgctgaaggtaataaatttaaaatataattgaacatgtatgtagtataaacaggatttagaccttgtaaatgaaggtgaaatccctgtatcgcagtggctatgtcacatgccttgaactgctgaccatcaatctcgatttttggaaaccttttttgccattcatagatattcagataacgctcttttcttgttatcaacttctttttgaatatctcaggagaaggatttcctccaagaaaaactgggattacattcctattcttgaagactttcttaattgcgacagccagataatctatgaattcttcgaaaaaaacattcaccattgacaaactgtgcattgaaattgggtcagttttaacttcaaattgacacttgccatattcaaaatctacgtcatacttggtactcaattcctttatcaaagtatgtgcgttcacaggcagtgatttgtcatcaagtaaacaaatttcaatttcaaccccgactctgtagatttcgtccagacgtcgtaggtcatcttgaattctcttttttaaccctagagtttggtctgccaagatgttattcaaatttgttaaacctattaatgatatatactataaatttctttatgtaagtattcgcataaaatctagcataataattagatgtaatcataaagcatatagatcatatagatttctttcttaaatgcaagataatttataaatctctgggcccgtcgtgctggctcatcatactatgtcagtattattctaaatattattcttcaatctggttacagaaaatattagatcaaaccatgatttaataattacagccttgattatgttctatcaatcatcactgtttatatcaataagtaatgactttgtcttgaggttatttagtgttacttgtttatgacatttataacacaaagtccttagattactatcattatgtagaaattccaatactgtcttaattttattttctaaagtgtcaaaattatatcctaaaaaagtgtagtaggatttaggtatgatatgatcacactcaagccaatttccaattttcttattgtatcttttctttttattcaatttcaatctacaaatctggcatgtataatcatccctcttcaaaatgctatttcgaatattacgccaataaaaattcttattataccatctcgtaaattccacgctgcattttctcgaacaatattttctaaatggtttacaaaccaaattttcacagtcgttatttctgcatttttgtttgccttctttgtttattctatcgaattcatttatataaactattaatttcaggatttttttggtttcttctttatttttattcggtacaattgatggaacatttttctcttgttcttcaaataatacgccatccatggttggtaacgaattcaaggagatattcgattttttctggagtctctttgactttttaggttttgtctttctttttctctttttgactatcatatagattttccctttatcaatactttgaagatagtttttatcaactcaaattttgatactaattagtggtattggaccagaaccatatcgttctatgggtgctagtatcagaattagtagtatatgcagaatgcagaacgaaaagtggtagtgtcataatcgattgaaaatttatacgatcccagtcgatttttaagtaaagataattcatcattcttgttaacagtaggaggaaaaaaatcattcctgagtaaggaaccttaccagctgacttgttgataatttggtagaattcgtcccattcaatagtgcccccattctcggtcaggaaaatcccagatccgtcggcataatttggtcctgttttggacttgtggtcgatgctcaatggtatagaatcagagttagacccattcttttcggaatccttgatataatatcccactttgtacgttaccattgaagtattgattattcctctttcaacaaaaaattgagcctccctatttattgtgtttgatgtttctagtgggattttgcctagcattagagtatcatttgataaatagaggggatttgaaaaaattaatgtgctgaaattattattttgggtagtgtcaggtaatttattattttcaagaaaacctcgagatttactgtaaagtgtcccattaaatcctcgaatgctggtaggttcacctgactgggagacaaattgcatgaaataaatgattagtaatggtgaaatgataatgaaatgccaagaaatttttatagatttcatagatttgagatcactattttgaatttagggactctaataaattttagatcgctataaacatttaaaaatacgatagaaaaatgaatatttatttaatttgatgagcaaaggccaggatggcttcccaagcaaatcactatttgtagttactttcataattctgagtttaaccttttctataatgattgtaggtgtttatctatcatcaattcatcagggatactcttgtaagacatggcctctatgtccaaacggctttggatttcctccaaaggaatacttttatgaacactttcatcgatttttaggactaattctggccctgtcattattttcatttactgcattttcattcatcaagattagaaacaggaatttaagcataaaactttccatagcatcaactctccttgtttcacaaataattcttggatgggcagtaattgcaacaaaattgcaacctattgtagttgctagtcatctttcaaccggaatcgcgttatttgggatattagtacttactttaatctcactgcagcacaagatgaaatcataaaggttaggtttaggaatttgtaaaacgattaccagtgagcggtttaaacaaaattaggcgtattattagatttttgtaagtttaaagagatttagcatatttatttccattccaaaccgatcctcattttttttcatgtacttgtaaattttaattaattcaacaaaatcctttagaatgttaaaattttgagaaattcgcttttttataaagttatatacactagaataaattttgaatgttgacaacacttgtgaaaagtatctctctttgtcgtataaattgtcaacgaagagttgagcacaaatggtagatgggatgataccttcacctaaaagagcatacaccgtacctattgattctcccactccaattgtcttgtttccatcatcaaatggaaggcattttgagggaggtgtaatcctaactggtctacctacctttttgattacttggcatggatattttttcataaatgaatccataaaaacatgagtttgttttcttctaaagtctcctgagcctatatgtgcatatccattgcctaagggaaagtaccaaaaatagcctgataacaacggaaaggcctttaaataaaaatcgtcgaaaggtacttgatcatattttactttatattgaatacatggtatccacagttcatcgcttaacttgggtaaatagtgtctgtgaaatccggtggaatcaataatcaggtcaaaatcttgttcaagatttttcttatttggtactttttcaaacacaatatcggtaccacttatcatatcttggattagttttaacttatcatagcttatcataccttttaaattaatgtcaattgtattaccagagtttatcgcttccccaatgtctaccctcatcttttttccatcatgcaaaacatagttgtcaaagtttagaccacatactttggcgtaatctctcattacattatcgcaggtagcccaagcacacacggcatcatgctccttttcaggcattctttcaaaaccctgcacatgtatatcgtgcagatcactaagttgattcattaaatatgcacctgcaacacctatcccaactacagcgatcttcataatatctgactgtaccattaatgacaaataaattgatttcattatttggaatgcaaatggatatgattaaaaagaagatcccaggtaagtaatctattagatggttgcaaaaagggcgcccaaaccaaaaaaaaggaaaatgccgggtccattaagggttggcatcgcattaatgatccttggagcaattcttgtggggtttggaagtttgtctgatagagaatctgtttctatttatggttttatagtggtagttagtggattcttcttatattttgtgtcttactactatctggatagactacagaaacgaaaagctactaatccacgatagtagtcatcagaatctaaattgaaaaataacagtagattttaaaaacaatgaatgctagttatttgtcatctagaaaaataatggatgacattttattcaaaagattttatagtaaaaacatggggatctcatttttttacaactcgtcccttttatctcaggatgatccctcagacggtgaggctaactatagcattaatttaagaaataaagatttgcaatttaatctaatcaaattgtcaactgaggcaaacgttgggctgagaatttttggtttagaaaaggggttgaaatcatcacttggggatatagaaattctaattgaggaagtaggaacccagccgtatgagataaatggtaataagaccgcatacactaccagtatttatccctctgaatcaggaaatatcaaaattaaacgcttccttgtttctcatgatggtcaaggatttcttttggcttttcaaaatacagtcgagcaatttgaatctaaagaaagccaggaaacatttgatacgatactcgatactttcaaattcttaaagtgattggtagtatgaaaattggtatttcaacagttcatctccaaaaaaaatagattaattctatctgggattatcagatgcttagtctggaggaacgtattggaagcttgaacataataatagtccaaacattaggttaaatttatcattcaagatatattgctggcttaaagggtctggagaactttgctttagctttggggtcatgtattttggagtcatcttcgtagtataccttgatacaagtttcctggatgccaaattcagcggatagcaatccaattccatccattaacgcgctgtattcatcaaacaaacctaagtttatccttctctcttgtgctaaaggggatagtgataaaatatcctcatttattttcttaatgaaatccggattgcgtttcactaaattcatatgttcagcagagattgaagaatccgaaagcaatgatttcataacaattccaaaattcttagttttagcgtttgttaccagatttaaaactttatcatagaggatttttttgtcagttgatgataaatatatatggatattttttagttgtgtatttcttgtcaccttcaagattttatgcaaatcatcaaggatatttgaaatctctaattcgttttcatctgtaactgggttaacaaattcactttttacactgggccaactattctgaaaaatggatcctttttgtggttctaaaaactcccacatctcctccgcaagaaatggacaaaaaggtgccagcattttgattcttgctctaaaaaagtatgaaatgacaaaaatatccgtattatttttagacacgcgatcagatctggattcctttcttttcttgtaccattcaaaatctttatccatcaaatatgtactgtatttagagcatctcttattcgcatttcttcaaatgaattagtaatatctttgatggtagagtttacacgttgaagtaaccatttatcctcccattctaaatcaataaagaggtcagaaaagttttcgtctataccatttgggtttgtagcagtcttttgttttgttataaagtctttaccaaattcataaatttcgtttagtttcgaatatatacccttaagagttgaaaaggaaaaatcaacatcttgtaataattctcccaaaactaacatggccactcttatggaatctgcgttaaactgctttatagtacttctcaatggtattatatttcccatagattttgacattttctttccgtccattaaaacagacccgttgactactatttgtctaggccataaagattttggaaatattattgagtgattaaatataaaaaaagacaggtgatttggtaccaagtctctccctgagtgtctagaatccaaaggataataatatttgaattcttcacgaatttgttttgattgaagtaaaaactcagtgaagatcgatttatccaaattaggatcaatcggaatggaaaccagatcgtctgagaaattatcattttcgtcaagggcaaggaaatgaccagacctgacacccaaaagaacataatcaaaaaatgcattatctacaaaattggaatatttttccaaatggtacaaatttacatatttagaaatgatataatataccatgtagataacagaatcagacaaactctcgatgatccagtctttgtcccatggtaatggtgtacctaacccagtttttctcgcacaagctctaaccttaagccaatcaaatacgttcttaaattctttaattatttcattgggtattatttccattctgtttaaacattcaaaagccaaagttttccattcaggattaccatagttcaaaaaccattggttattcaataatttgacaaaacatagagtcccgcatctacagtaaactggtttgttagtcatttcgaaaaacggaacagattcccctaaagcaattaaccggtctttgactaaatctttagcctttgaaaccggcattccagaatattcaaaagttccttcgttcattttcccgctatagaattctgtagcgtataattcagatgttgccttctctaaattaggatcattttggtgagatatattgtattttgttaggaaaacccttgatggaatcacttcatttcccttatattctttttctgtatccttaatagaacgtccttttgtattagtagcagtttcactaccaacattgtctgatatttgatcatactgttcttgaattttagaatctataattacgataggaacaatcgtgtctggactcaatacggcagggtaatctgaagattgttttgtaaaatccaatagggcttgcatatcaaatggggcgtgagcaggaaccgacattacgattccactgccttcttctaaagtaacaaatgtagcgggcaaaattggaataaatcgggtcgttaatggagataaaaccaacgagccaatcaattctttgcctaaaagtgtcctggttactttaattgaataattcagatactctaatttctttgcggcggatctgcttaatatccaatcttcagtttcgttgacaagtacgacaacatactcttcgtttggatttatccaaagattagtcactccaaaaatagtttctggtcttaatgtagctacaggtatgaatatgttctcatgtttaagcttgaatttgatcagggaatactctgtaaatgatggctcaatgtcacccaaagtatcatgctggctaactgggtttgaatcattaggacaccaaccaactggatgagacccttgttcgatcaccccgagcttatgaagagtttcaaattgccaagatattagtttcttatatataggatcaatggttgtaaattcccgtctccaatcaattgaataccccatctctttcattccagcctttatctcattatgaaaatatttggctatttgaagaggctccttaaaggtaagtatatcttcgtcactgatattgtatattttactgaaattttctatgatttctttatctcctgcttgtaccctccttgccatccctagaattggggtacctgtataatgaaaagccataggaaagagtacgttataacccctaagcatcttgtacctggcatgtacatctgctatagtgtaggttcttccgtgtccaatatgctgtggtgagtttgggtatggataggcaactgtaatgaaaaatttcttttggcccgaaataggatccgatgtatttattgcattttgctcccaaatttgtaaccatttgttttcaatcgaattccagatattgacgtccatttctcttccttatcctcatttaaacgattttgctgcttctatcaaagatatgatttgacggagttaaaaatggcatttgatcaatatcaagataatttaatttcacaattctaaaaaatttgttcgctgttatatttaggttgtcaaatcaaaaccagagagaaagagggcgggccaaaaaatcattttcaatgccttttttttgctgttaaggcgtggtgttagatctgtaaacagctaatatgtcaaatattgggaagatttgtagttttttctactcaagattgttttggcaggtacattctgaaacgcttattttgaacttgcaatgaaattaatatgaaattgaataagtaccagaattattcaaagtataaaaacggaatagcaattccatcattgattggtacagttttattcattattctttattcttattcccgcattacttcccccggcgtagaagtttttttgtctgattcattatactcacttgctgcatcagtgctgataggttatttatcttgtcttttccttttttatttgagtatttacaaatattatttttcaaaatcaaaaattgaaaacaatcctcagaatttgctgtaccacttgcaatctccttttaaatcaacaaagtacaaactcatttttgtaatttctagtctgatttattttgtattctttgggtttctttcaaatatctttatttatttcgtggatgaaaataccgtattttcaatttaccccattcccccatctgatcatttaccacatgaattaaacgtgtctcatgcgaccaatcgtcaccaaaatgcttcggaaacagaaagtctaaatgaagacttcgttaggagcattgattaccccagctacaaactcattatttgctgcaattatattggatatctgccaatgctgattcttcaattaggtgaaagcttatctattctaataatacctctgaacttaataattgggataacactatctattttagttggtttgaatgttaccctaaacatattcattttatcaaaaaatcgaacagttaaaatgtcaaaaaaaaacctatttggagctgtaggaatttctaccggattatttgtaggatgtccgacctgcactggtagcttattttactctctagtgggctttagctccatggtgcttttatcatcattaaacttctatcagatcttgttcgtggttataagtataccaatgttatttggatctctattttttatgatgaatatgcttcgaaaaacttatcttgaatcttgtcaaataaaatgatttatctaaattcctaaagaaaaattagggtttgattccttgtttgcggttattctttatctatgaattcatcaggtgaaggtggttctggattaatgccctttctttttcttatgtcggtaataatatttcttatgactgactgaggaactgcttgccatgttttaaaataagtactccacattgcttttccggctgttccccccctcatcaattcagacaaatcaaatgtttcggaggcaggtacttcacccaagataatagcaatcacacccttttgatctacgtttagcaatttacctcttttaccggacaatattccggcaactgtacctatctgttcctgtggacattttacttctatacctaggatcggttctaacaacacaggatctgctatcaacatcgatccaagcatagctcttcttgttgcaggcattaattgagccaaacccctgtgtgccggatcctcgtgagggacaaagtggtgtaaaacaaagcgcaaacccctgacagattcttgagcaatcggccccgaatgaattacatcctcaaagcctgattttattgaatccatggactcttgaataaattgaactccttttgtctcatcagaaagcatattgccagttgggtcaactgtaaccacgctcctagcgtcatccgtactccaacccttttccctaagcaagcgagacatttctttcttgtccatatcttctcgcaattgtcctgtcctaatcatatcgataacttcctcactcaatggttctaccctcaaaaatatcttgttgtgtttgtttggtgatttgctcattattggtcctgctcttcctctaatggtttctctgtagttaatcaaaggttgtgtcgttttaatatctaagcctaattcttgcaataaggaagttgcaatttcaaggtgcaacactcccataccagccattagtgtctctccagtttcttcattaatctttacaattaggtttggatcctcaacagtaattcttctcaacccttcaacaagttttggtaaatcttttggatgctttggttctacggcgatggtaactacaggttcagaaacatactttatggattcgaaagcaggtactgttttgatcgatgaaatagtctcacctgccacagcataatctaaccccaataaagccggaatgttaccacatggaataacacttacgacttcacgtgtgttccccatataaatattcacagattgtacttttccagttcgcttagcatctataagaaaaacttcgtctccgtctttgatcgtacccgagaataatctaccagtcgcaaccctcccggcctgaggatcaacgttaattgttgttaccatcatcaaaaccggaccattttcatcacaatttaagagagcctttccaatgtcagaatccaaatcacctggccaaatttttggaattctatatttttgtgctacgtgaggtggaggatgatgttgaaccaccataccaagaactgcgtcatgcaaaggtgctctttcggataactttttgatagatgtaggatcggtcgatgtgtatgcatcataaacgtccttgaagctaatcccttttttctgtgccaccttaaaattaaaaccccatctatcctttgcagatccgaatgcaactgtatttccctggatgcttaccttccatttttccttcagttcaggctcggcgtagagatctactaatctattaaactctgcgataatgttagataaccacttttgcatggcagcaggatccaaacgtaattcttttaccaacctgtcgattttatttatatataatacgggcctaactcgttcctctaatgcttgtctagttactgtttcggtttgtgtcattataccctctaccgaatctgaaactacgactaccccatcgattgctcttagggctctagtaactctaccagtaaaatcaatgtgcccaggtgtatctatcatatttatgacatattccttaccatcatcattttcgtagaatagagtcacattagctcccctaattgtcatttgtctattctgttctagtttcatggaatccaaggccaatgcttgtcctgcaacacttggggagataattcccgaagcggccaaaaggctatcactcatcgtagtcttaccgtgatctacatgagcaataaccccaaaatttctaatttgatctttatttccaattattctgataatatcttgagtcgatttaaacttgggcatcctatatttcaaaaaagtttttttagggttattaaaccttccttgtgtaagatagttatgaaaaaccatgtaaaaggggttgaattttctaactttcttttattagtttcaagttattaaaggcagatagcggcggatcgggggaggctacaacagtaatacatattccaatcaggtatcctaatctgaaaacatacaatttagaccacatagcaggactatcgaatgtttaaagttgaccaacccgttaacttatatgacaacaattaatcaaaaaaaatgttaactcatggtgttagaaattagagtgggacatacacccgacgctgatgatgctttcatgttttacgcaatagaagaagagctcattccaatgggagactttaagattatgcaccaagtagatgatatcgaaaaactaaacaaacaggcgattaaccatgagttagaggtaacggctatatccgcacatgcacttgcatttctcaaagattataaaatactaagcagtggaggcagttttggaattaactatggcccaattattatttcctacaaaaaatccttagatgacatttcaaataacattgttggaatccctggatatatgacctctgcgtatcttttgatgtcgatagcccttgggaaattaaattgccgtgaaatgctttttagtgagattcctaaggcgatcattaatggaaccgttgactatggactagtaatacatgaatcccagatcacttattctaaggatgattttaataagttgtttgatttgggcgaatggtggaatgaaaaaactagcggattgcctgtcccattaggaatcaatgtggctagttctaaattgatgaataagaatatgatcaatgcctttgatagactgctgcaaagttcgattaaatacagtctagatcatctagaagaggccatagaattttccaccaaatatggtaggggaaccgaaaaatcaacactaaccaaatttgtcaaaatgtatgtcaacccctataccgtagatatgggtaaagatggaagagaggcaatttctaggatgtttgagatggcacgagataaaggcataattaaaagtattcctccactaaactattctttttgaatatgcagttctaattcggaccttttttttgattctcatcatttgatttttttgtgaaggtattaattttgcgagctccgttatctattattagattttataaaaaataaaccagttatgatatggtgagatatctggagtattggtagcttttaccatcagatgaatgaatttgaaattaagaacgaatcattatgctaagccaagtacattattttattttattatattgaaaaatgtgtctcgttgtacagggtttcgcttgatttctctgatcagaaagttcagctcgttaatagaaatttggtttggtttacctgcagccttaaaaatttcctctgaaaaagctgttccgaccaagtcattaccgccataacataatgctacttgagctaattttttacctaaagctatccaatacaccgatacatttttgagtactttaccgagcaaaagccttgatatcgctattattctaagatcataaattgacggactttcagaaatgagcgtgtgttccctttccagctgcgtattttccaagctaaattttagtgggataaatgttgtaaatcctccagttttcttatttaattcccttaactttatgatatgatcaacaatgtcctctggagtttctatatgaccgaaaagcattgtgcaattgcctttcaaacctattttatgggcttgatagactgtatctaaccattcttcccctgaacatttacctaacacaattttgtcacgagtatgcttactaaatatctccgctccaccgccgggcaacgcatctaggccagcatatttcagcctctctaaaacttccttgactgaatttttagtaacccgcgatataaaaaaaatctcagcaggggtgagcgctttaattattacctttggaaaacggttttttattgacttaaacatgtcttcataatattccaatcccaactttgggttgaatcctcctacgatatgaagttcagtggcacctaggtcatttaaagcaaactcggccctttttacaatttgttcattcgatagtgtgtatgcatcatcatctttttcctttctataaaaagcacaaagctgacaacttgcagcacaaacattagtgtaatttaagtaataggatgaaacaaaacttacgttatctccgcgaatttcttttctcagttgattcgcagcatttcctagcaaaaacagattctcattcttaagcaaatcgacaccttcattaaatgtcaactcatcacctgacatcaccttctctaaggcggcagtaggtcttactagagtattggacaatatagagcataccacataaaaaaatataagtgcttttaatgctcaaaagcaattgtccaaaaatcaaagaataaattataccaagattaagattaaacaatcattgcaaaataccgaggttcaacatgatatttttaaacactctgaaattgaagatacaataaatagaattctagaaaatcatgaagttaagttaaatgatgtaatttacttgttagaatcacaagagattcaacgtttagggttggttggtaactccattagagagaacatgtttggcaaaaatgtcacttttatcaataatataatattaaattatacgaatgtttgcgttacttattgtaagttttgtgctttttatagacctcctggacatgaggaatcatacactgtatcaaaggaagaaattctcaatagggtcgtttttgcaaaagctaactacaatataaaacaagtcctctttcaagggggacataacccaaaattaaataccgagtatttcgaggatatcttcaggaccctcaaagcaaaatgcccagacgttgcaatccatggattatctgcttcagagatagacatgatagcaagagttgataggacatcgtcattagaagtattggagcgtttgcaagacgccggtcttgaatcgctacctggagcaggtgcagaaattctggttgatgaagttaaggatattataagtccactcaaaatatctagtcaaacatggttagacatcatggaaaaggcccacagtatcgggattaaatcttccgccactatgatgtatggaactgtagagtccgtggaacacagggctcgtcatatcctcaagattgcagatttacaaagaaaaaccaatgggtttatggcatttataccatggagttttgaacccaataaaacagaaattcaagacagtgggatagtacaacatcctatgggcgggtttgaattattaaagatgatttcggtgtcaaggattgtctttaagggtttgatagatcatctccaatcatcatggcttacaaatgggattggaatggcgcaattagcaatttaccacggttctgacgactttggaggaactctcataggagaagaagttgtaagtgccactggtgcaagatctacagaattgttatctaagaacattattactgcgataaaggctatgggatacagaccagcagaaagaaacaactcatatgatatagtaaaacagtattaaaaatattaaacgcatgagtttctataaacaaaatctgtagttagaatttggatggcgatacacaagggcctatttaaatagatttataaatgtattttcataaactttacaattgtgccagttggaatagacgacatggctatctacgttccgaaactttatatagactacaaagacttcgctgaagcaagaggaatagacccccaaaaactagaatatggaataggaatcaaaaagatggctttggccgacgctaatcaagatccggcaagcatggctgcaaatgcttgtatgagattaatgaagaataatgatcttaatcctcaagatataggaagaatttatgtagctactgaatctggattggacgaatctaaagcaatgaattcatttgtaattgggatgttagaacaggtatatggagaaagtactcttgaacacgcaggtggtatagagtgcaagtttgcatgtgtgagtggctcgtacgccttgtatgataacacaaattggatacgtgctggtgagagtaacgataaggcagccatagtcattgttagtgatattgcaaaatatgacattggttctgcaggtgaatatactcaaggtgctggggctatcgcactactcattaaggataatcctagactattgtcttttgatgagaaagttacttcaaccattataaaaaatgagtatgatttttatcgaccttttggaaaagaaacgccactagttaatggcttatactctaatttactttatctgattcaagtaaggaaggcccttgagggttataaggaaaaggcaattaagtctggcataattagcctgggaaatgacgaatcaatcatagaccacattgactacgtcagtgtgcatttaccatatagaagaatgggagaaaaggctttggcttatttactgaggcacgaatggagacatttatctagatggagtaatattatttctgaaataggtacggatgagcccgttcccaaagaccccagaggtactattgagtcaatcttggctgacaccgactttatgaaggctgatgaaaaatttagaagggagtttatgaaaacaaaatattataaagaggttttcgacaacaaaatgtcctcatctttgcaggcatctgccgttattggcaacctttatactgcttctatgtatatgggattgcgaagtttattagaatttgaatttttaaagggtgtagatttatacaataagcgaataggttttggttcttacggtagtggttgtagcgccatggtattttctggagttatccaagaaaactataaggatcttgtaaagcgaatggatttagataaggatataggacaaagaacaaaaatatcaattaacgattacgaaaaattacacaggaatagtcgcaaatataatgaagccttcttaaacgcagaaaatgaatttattcttataaatgtaggaggcacaacagctgatagagcaggatttagagaatattgttatgcatcatgatctttgaattatgatgtgtaggatcagacttggttatctaaactaaacattttttatcgtcatctaatgattctgtaatttattttttgtttgctgaatagttcaactaacacatttgactgctctctgttctcaagttccaagctaagatatactccagctgtcccagcaggaatattcgaactaagtctgtcatgaactacctcaacaatatttacgtttgcttgtgcaatatcattcactatacttctcaaggcccccggcttatctttgagttcaataaacaattttattagtctacctgtttgcatcaatccctttgcaactacctgacctagtagatacatgtccacattgccacctgataatattgatacaatgttcttgttttttggaatactcttctgatttgaaatcagataagctagggaagcagcaccagcaggttccgtaacaatttttgaacgttccatcaataaaaacattgtctttactatagaaaggtcatccactaatacaatattatcaaccctatcttttattatctcataaggtaattttccaggtgactttacagaaattccatctgctattgtatagccttcttgaactttactaattttcccttttttgatagcctttttcatagatggaaaagctgtagattctactccaattatcctaactttaggattgattgtttttatggctaaggacacccctgctattaagccacccccaccaactgggacgtacacctcatcgatattcttcaaatcctcgaggatctcgagtcccactgtaccttgtcctgcaatgacatcgggatcatcaaaggctggaacaatggttctaccctccttagtagcaacttcctttgcataaacagacgattcatcatagttattaccttctaaaattacatttgcaccataagatctagtagctgcgattttggccggagaagcattctttggcatgactattgtgcatgacatcttattcatagctgatgcataagccaccccttgggcatggttacctgctgacgctgctataacccctccatgttttgaatcagcgtccaatctatcaatcatggttactgcccccctaaccttaaaagagccagtcttttgataacactctaattttagataaatgttattgccacatatatttgaaaaagtatttgaccgtattaaatcaatttttctaattgacgactttgctaataccttttgtgccccttttatgctgtttaaatctattctagaaattttttttctcaaagaaatggtaatccagggtttatttaaatttagttctacagatagtctggttagatattttttcgccaaagtaatagaaatatggggaatttttttttattgactctactctactatctctaatggttttccggatccatcacacaatacttgcgatttttgttatttttgtaatcaatttaatttgtatccaatatgaaaccagcaggaaagaagtatgttttcttttatcaaaggataatttaatcagcaattctaatctgagctgaaaatagtctgtgcgtgtgaaagcattacatcatttagaatctcaatgttttctacttgaattataggatggtgtcttgtgcctctttctttttgtttttttgttgatagcagttctatctggaatttgatactttgtaaggaaaagaaattgtttggggtttgttactggacatcttttgatattgactccaggtcgccaattttgaacatcctcataattacattatccaaagtcttcatgcaggggacccatcattacaacatttgtttcatggattgtcctaattgaaaatatttgagacgatctagcatcaacattctgatcgtgtaaagatggaatgagaagtactagaggaaaactgatgtgcaaacccctagtttacttctcatccatacactatatcataaagcaacattaaagtagacatcttcaattgatttagtgcaatattttttagaaaataaaatatttagattgtattatgattattgaaattgagaataaatcctggaaaataaaccagcttgaaatgagcgataaagcgaagagtagtaggtataaatatgatagaatctccttttatagataaatttatcactccgaatagttccagttctagatagacactacttatatcatatttttgatatttattgttatattcccaatcttagtttctgtcatttctacctttaaaaaaatggacaaatcagtttgaacagaaaggattagttcaaccaagtcaaaggtgaggacaaccctgcggggcatcaacgtcaggcaatgataaaagcacttctcacgttttcacactaactaaatccttcaagattatcgaaagattcagaaacatttatcacgtgaatgtagccctaatttgaatcatcctcactcccttcaagatgtttagtgaatatttcatttgccggttttgctttcgctaaatacaattggtaaaaacggtatataattttgatccagattttcattctagaaattcagaatctagaaatggcatgaattttttgccaaatatattgcagatatttctcgaaaaatgacttaaagaagtttaaaccttatttatataagataaactagttttgtgttttgtttcagacaaacgcaatagttctactagtcgtatttagtaatcatgttattattacagtggaagcctgttgctctcattgttttagaattgcatcacaccttcgttttagctcgccctcacggggttttatacgcaatttgtttccacaacaaggacagtaattattagattgccaaattagatatatctgacaaacttgacatcttttctgtccttctgcgtacctgagcgtgtaacttcctcctccatggagcgctttatgcctcacacaaacacctttacaagccataaaagatcccatacaactcttgttctaaaaacctgtattatgatttttattatagataataactacaaaaggaaaagcagactttatccagaacaacagatctaatatcggctggggcattattgatttttttatgcacaatttcaatctaaataaattagaggtacctatttttcatgttacccctggtatcctgatatttactacagtatcatattattttttaatattttgtgatcagactttttaaattattccagagtactttttaattcatttttcatcaaatcgtacagaaattcgagctcattctttattgcgtcaattgattcttttggtattttttcaaaattaattactgaagttttttcttttgtttttttattctttatcatttcaaaatcgacatacataaccatcccattttcaccttgtagcatcttgttttgatcaagggaggccaaatcgatatgataagtttcaattataagattttcaagatccttctttaattttgatatttgttcattgttcttttctatgtcagggtaattgacctcaatggacgaggctttttctattaggctttttgacaaatcgttatgtgtaaataattcttcaaatagttgtgtgttatcgacatccttataacctaatttttccagttcatcttttattatttgatccccttttatagtaatttcactttttgcactgttgttcaattcttgcaactcacggattcgcttagatttttgtataacctctttatcaatttgataatacagtaaagaatgaaattggattcccatatatatataaaaataaaatttatcaatttccaagcttacctggaagtagagtcgtcgtatatcgtcagattttgttgattgtacgggtacagtttgccaattctttgatttggcacttaccagcctctcaaggttttgaaaaagagttactattttatttggatcaaatgaagaggtttctattaccgaaaaatctgctaacattaccttggtgtcaacggtgacagtattagctcttatggaattttcaaaaacttctttaatattttcataaaatttatttaaaaagatgattgtatcggggttttttcccttttctttcagcggtaatcgcatctgtttctatcttaatgatgactatttaaaatttgaacttatctatggaatatcaatagattaaaatatcatcccagtaacataatggttatgcctacagcctacatcttgattaattgtattttaggaaaggaagaagaaataattaaacaaatatctcaaattccacaagttaaggaagttcgtggaacttacggtgttcatgatatgtttgttaaaattcaaacagatacggtagacgaaatgaataatacaattaccaatagcatacgaaaaattaacggaataacatcgactgttacattggtctccatacccgaacagggtggcaggggataagtttccttattttttaatgtgcagaattataagaaaactactaacagccacacttatccaacctacggctccaactatcgcaaaaatataatagattgggattaacaaagcaacagctgctaaagctgcgccgagacaccatataaaaagtaatatttgtatatctatttcagaaaccttcaatttaaccccttatgtcctcgtcgtatccacttattgtgttaacaatttttccacaattcgtgcagacattaaattccataaattcgaaatcatcatatttcctgtaagaaaatttatcatcatgagtacaaaaaatcctttttatgttctttatcaattttttcgcatctcagatcgatattatagtgccgccggtgagatttgatctcacgacagctcggtcttcagcttcaccctgttagttaaacagtcgagtgctcttccaggctgagctacgacggcacattctaaaatcattagtttatagtatatatattattgctttaaatcaatcaaaaataatattcttaggttaaaaagatatatttaattattaaataaaattcgaccccaatcctaataaataaatgagtataaagtaaagaattagctatgacagataaaaatgaaatggatagttcagctaatgaatcgtcttcaatattagaaagtcctgaagaaaagaagagaagattcctaatggaatttgagaatccatttaagtgtgataaatgcagcgaacgatttaaaaagaaaaaatatttgagagagcataaagccgaagtgcatgcatattaacactacctttattataaactaggctcatttcgacgccaaccacacccaaatatcatagatagtaatagtgaaaaaatgaaaatatatacaaagactggagaccaaggcaaaacaagcctagctgatggtactagagtagaaaagtcgagtagccgtatacaatcttacggagcagttgacgaaattaacagccatattggaatgttgatatcattaatgaattcaaaatcgaatttggcagatatgatacaagacttgatcgtaatacaacaccaattatttaccttggggagtgatctggctaatccacaacaaaaggtggaaaattatcctcgcattactgagggggatgttacctttttagagaattgcattgacagatttgataaggaagtagaacctttaagggccttcattctccccgggggaactatagaggcctctcagtgtcacgtgatacgtactgttacccgcaggagtgagatcaaaatagtcgatttatacctaaataatgaaatcagtaagaattgctttgtttatattaataggctttcagatcttttttttgtattggcgagagtttgtaatcggagacaggatcaggttgatattatttggaaaaaatagacatgttaaagtcttctatttgattgaactttatcaattgtgttatattaggatatcatcattcaagtttaggtttgactacttttttgtttatccacaactgctgtacgtaatagaaagcggctagcgaaatttaaaggtacaagattatcagattaattctttctattattttcaatattgaaaaattaacctctaaatcagacttaaattattggtaccttttcgttcctgtcgctagaatgtatttggctgataggatcatttccaagtttatgctgttgtggatggatctccaaagatagctattcaaaattcccaaaagcatcagaaataattctcaaacagatacttagtttggaaaacaagatagatccctttgataaccaatatgtctacctggcaataacatcaatacatacccagtattattgacaattagtttacatggttgtagttgtggaatttagattatctggactgctagtagtattgatagtagattgagacctattattgttcactgtagtagaagtgttaccataattggatatccaacttatattgttaaatgtatttataacattgtaatttactgcattgtttatggaatctgtaaagctttgagggagtacaacttttatggtagacaataagaataaaagtagtaagatgaaacaaagagccaatcccaaaattatccttttctagattaatatacaaaaggaggaactataccaatccatgatggatttctactttctattcgcatatggtgattagttttcggttttagtcattccatgaatttgttgtttccatatataactcatctttttgcagaatattttttctgttgtgggtttagttttgtctttgtctcgatctattcgtcgtcatattttcactttttcttttttttatgaagagcttgcaatacatacatccacgttcctgttcaacttgtttggaattatatgctttgtcaacacattgagaagttgcatttttctgattcttttttctggttttggtttatatgatgatggtcgtggtttactaactggattatcaaccacatcagttacgaatttaaatttatgagtgttggcaggtgatatgacagcagatttatggataatgtctttgtctggcaatatgtataattatgttcagcccagtttgctcctatcaatagaggattattttcttcagttatcgccttcccaaagaagtctttattgaaaatatatcaattgattgctatgtccacttgataataccaattgcatcatcataaattttcagtaaccgaatccaaatcttttgaatacattcagtttattccattgctgagatctttggtaacatgaatagacgcagattaaaattcagggcttcatcttttaaacggacatcctgttcttcgtaagcaaggaataccatcaagtacttttctatatgacacaattggcggacatacagttttgtgttgtttttatttgggtaaaagaactctttcttcttataattttcctggaacatgaattatgatacaaatatcatcttttgttcctctctctgtatttctcattctagatacaagtacagtgtagcgagaaagataagaagctatacgcctattaaattttgggataggttcttagaatatagatcgagttatattctctaatataaacagacgttggtcatcaatccatcattgaattgttactttaatcaagaccttagtgcagcgattggtgtcacccttgatgctttccaagcgggtaaaaagcctgctaccatagacaatatgacagaagttatccaaacccttaccatgtccagtggcaaataaacaggctcaagcggtgggccctcgccagcaccaggtcctgctctagtcaacatgtatcctccacctattcctcctagaagtccaatagagccacctaaaatgcctattatgagcgcctcaaccagaaaaagaatcaaaattgtagtgccctgcgctcctattgctttaagagtacctatctctttggttctttctacaactgaggtaaacagtgtagtaataattcctactgcaccaacaataagggagataacagctattccgaacaaaaacgacgtaattccagctgtaaattcctcaactgtttctaaaatagctttgactgtggtaattcctatgttgtttttataaactgcctttatttgttgttccactgcatcgacagagtcgctatcctccgctgctacaaatagggaatcatatttgccagctctctgaagtaacgagtttcctgcctcaaggttgataactattgcattatcaatagtaggattacctgtcgattccattatacctgaaactacaaagtttttagagttttcttgagtatttcctgcttcatctacaaaagagtatgttaacctaatagcttcaccaatctgagcgaatggaacgtcttctcccggagggaatgcaacatcctccgccaatatcgctgctgagggatcaccttctcttattgaagaaccttccatatatccgagagtcggtgcaataatcgtaagggcattaggatctacagaaagtaccggattattttttgagtcacctcttgacgaaactgtaaccgtttcttgaaacgacggttccacttcatctacgaatggaagtgaaccgattctacttacaactgcttgatttagagtaattttggccgttggtgatggagaattaccagagacgagcggggccctcccgccatcttcagattgaggtacactgcttacaaataaaatatttggtgcaagattgctaaattgtttgttaaaaaactctgtaaatccagcactaaatccatttacagccacaagcaagctactcccagccattaccatcaatatagtaagaattgacctaacttttctttcctttatagcattgaaggaaagaataaagatctgtttaaaattcattttatgctgttttcacaactccattacaatattcgttttctcgcctatcatatacacatttacttttgctcattacttctatcactttctctcggtcctgaatccaaatcgttttctgaatcgctatagtctgccggagattctatcactttattttttttctttttccggaaacgtctaatgacaaaatataaaacaatgccgataactatgagcattacaaataatataataggatatataaacccaaaaattaaacctgtgtcgttggaagaatttcctatttgaggagtatagttcacggtaccgttaactataaggttatggccattacgaaggttatccttataagatatctctataaacacaggataattaccagggcgggtattgttcggtatttttaatggaatactaacaggtaacggagaattctctgcgagatcacccagatattgtaaaggtggatattcctcaacaaggtgctctctagtgctgctatcattgtcatcatacttatttaatgtagaagttaagttcgatgtcttcatcagtgatgatggaatcatttttgcagttgtaaaaaatgcctcagtattgccttcatttaagagattcgctactaggttaggctcatctcctattatatttacctcaaaatcatatgcgcgaactgttatattaccatcaacatataaacccacatcaagtttttctgattttgctattccatccaaaagataatccaaattaaaattcaattgaactggtttaccaatcagttcttcagatgcaaataaagtagtattaagcaatatatctttggtaattgtatcaaatgaccatctagatggacctaaaatctttacagattcacttgacggttgaaggggaatcactacatcttgtatggcagattgagaagaggattttttaattgcaaaaatcatatcctcaatacttcctgcagtaatcatactattatttgatattttattattaaggtccttttgtgccgaattcatattggtgtcagctttatcatctccaacatatacattgaaattagattctgttggctctgcgtttactaccaaacccaaattataatcgattgtctctcgattccctatcgaatttccatatgaaatttggatatctaagttttggagagttccagcagcatttgatgaagagtatatcaacgggtttattgataccatttccccaggatctatgttacctacatcatactttagtgtgccaaaggttgtaattgatgggtttgttactttatcgtctgtttgaccatcaccagcagaggaggacaaagttgtatttgaagcattggctgttgtagaattactttgttgtacagattgaccagacgaactttcagatacggaggcaaggctttcttcagacttatcttcgtcatttgaaattgtaattattgcattatttgcaactgcacttcctttatttattatattgatatctactttgttggttttagcaggagttaaaaattggtttttagtatcgaggtctagtagttctttacctggaattctaaatgagatggggatatcttttaccacaatatctccagcagtcaaaactttggaatacactagatcgagatacttataataagatcctacttttgcatcattctttatatatatatcaaagtaaagagtaaattcttggcctggtttcactatagaatcatagcttgcaatagctacatcagaaagatcattgttattagtagaagtcatattattggtaatattttcatgttttaccgcttcgaattcatctggtaaagatagatatccttttattgcagaaatatcggtttgggccttattaacaagtacaatagctaaagtggcaattccttcccctggtcctacttctttctcttccagtttgttagagtcatttccagctgctatggtcttgtcagtccagtaagaatcttggaatccaggggtcctttcgatttgttgagcatacgaataaaaaccattgataaaattatcatgcaatatacaaactgacactacgattattataatcgaaaataccaatttaagggaaaaagaacgttgtttatcttcaaaaagggattctaaaaatatcattttagttaataatctctttttcaattcttccgtcccttacataaattgttttgtccgtatctttagccaattccggattgtgggtcaccatcactattgttctattatacttggaagagatcattttaagcaatctaaaaacctctgccccggtttttgtgtccaagttacctgtaggctcatctgcaagtataattgcgggattgttcattaatgctcttgcaatagctactctttgttgttgtccaccgcttagattaaggggcttaagggatgctttttctttaatgcccaatattttcagcaaccttaaagctctctctcttacttcatgaccatccattcctgcaataattgctggaatttcgacatttgataaaactgttgtcctattaattaaattgtaggattgaaaaataaaacctatcattttgtttctcatcttcgcgatttttctgtcggaaagagaaaaaatatctaaatttttcaagaatatttttcccattgaaggtctatcaagtgcacctattatgttcaataaagttgattttccgcttccggatggacctacgattgaaacaaattctcctttttttacagaaaaattaatgtttttaagtaccacgctatcgcccgcgggcaactgatatactttagatatgtttatagctttaagaattgtataattgttattttgtgggaacattattggtagatattgaataatcatatatatctagaggatcattaccatcaacttttgtgattgtgttcagattctccatttcagagtttttatcaaaaaaaataatcacggttaaatcttgtagtatactttactttattattatggagcctaagagagttctattaactcttcacaattgcctgctctatcatcattctgttgtatattaaagtcggcaaccacgtccacaccttctccacaatcaaaataatccgccccagggccgccaacaagaacatcgtcacctaaatctccgtacaacttatcgtttcctatctctccaactataaagtcgtcgtcgcctccgccagccactatatcatttcctattcctccataaaattgatcacttcctataccaccttgtaaaatatcgtcacctgcttcaccatatagtttgtcttgtccttcatttccttgaattatgtcacttccgttcatccctgatattgtatcagaaccagaaaatcctataatgatgtcggtttgttgggtacctgttattctatcatctccaaatgaaccaactacaggatgttgtagccgttggaataaagtatcagattctatagatggttgatcactgtttatgcctgccaaagagggttgttgagatccagtagaattaggaaacggttgagtcgattgagatgtttcaatcgaaggttgatcattgttctcgcttgcatttattactctagctccagcatcactttgagaagcactgtctgcagaattacttgattgagggccattaagatcactcaatctctgagcaaacgttgagattgaatttgggagaaaaattaacgaaattaataatattgaaattgttaaaattctaatagaatccataagttctaaaagtacaagtcaattattaaccttctggtactaaagttttcccatttgttgaagcattctatattttttgatcgtctttaattaaatcaatagtattaaggtaactctttcagtcgctactcatttaccaacaccatcaaagctaagattttatgaatctattagtttacttgtaatggtatattttctaatataaaaatattaatgactatttataaaggatagccttaatttagagttatcttgggtattacagtcactaaagctacttttattatcattgtattaacaattagttcccagatattgttatatcaagatacacctaatttgtcatttaaagcgtttgcaggtggcggtggagatggtgacggtaatagatatgcaggcccaatcaacaatgcagactcaagtgaaaaggttatttattgtacttttaatgagaacgcgaaagctcctctatgcgaggggacgtctcatagcgatatcattctgggaaccatccaggaagactatatagaaggaaaaggttctgacgatgctattcaaggcagggcgtctaatgatgatatttttgggcagaaaggtaacgatgatcttcagggaggtgcaggagccgataacatttacggggaaaatggggatgatttattatacggtggcgatatgggagattttatcgtcggtggaaatggtgatgatgaactgtacgggggtacaggcgaggatattctagaaggcggacctgattccaattactttgattgtggagatgattacgacatcataattgattttgatccatctaaagatactgcctcaaataattgtgaagatatcagaacagatctttaaattataatatttaatctttatttcaagccagtaaataacgttatcataagacgctgcttattagggtacttcataagctaaggttgaatattattatattgcgcttctttattaataggatttcataaaaaaataaacagaagagcacaacaaccatccttgaaaaaatattttgctaactcagggggttgaactatagtacaatccatatttaattaattcaattatatactaatgcacgtataatcatgtcgaaaaatcataaattcagtaggggcaaagtatcaaccgagaagacaatatgaaatcgaattttaaaatcagacggtttgttatcattaccgggaaaaatatgatgttaaattatattgtaagggaattttattgaactcagtatctaccctgtattaccatagtattaccacagcaagatgaaattatatcgaacattcttagtgttacaaagtatctcataaaactcactataagatttattttaaatccataaatagaattttcttttcatatatttgtcaaaatgcctatatatgctccgacgttttttgtttcattgtttttatttatgtctttaatcatcttattttgtaatagttttaatttttcgaaagctcaagaatctcgagaaaacctaattgttataccagaaccaggtgattacaacattacagatggtacagatagaagtgacatagttataggaaatagcattgttaatgtgattgtaggagaagagtcagatgatgttcttatgggtagacaggcaaatgatgaattacacggagataaaggtaatgacatcctgcaaggaaatttaggtgcagatatcttgtttggtaatgatggtgacgacgttttgttcggaggatctgaggaagattatatgaacggtgacaaaggaaatgataggatatatggtgatttgggcgacgatgtattggaaggaggacaaggtgcagactatttcgattgcggggagggttacgatgttatcgcagactttaaaaaagtagagaaggatgtcgctcaaaataattgcgaagagatacgaacaaatgtttaaaatagtaaattaatagcttacttctaactcttcattgtgctttcactgtggaatactagaaattctctcaatttaccattcttcataccattcattggatagttttgggtttagaattatgccaaacccaccggaggcgggtttgagtatatctaccggtgaataagacactcctgctcttcttaattcaaataccccgtatcaagtactcaggtactgatggcaattaagtggaagtagggttaagttatctactagtgctataaaggaccttgaaatgggtagtgggttaggtgatactacattcatgaatgcttatcagccaaacaggttatgtcaatacagaactcaaaaaaacaacagacattcctgactacctaaaatcatttacttagaaaattcttcaaattcttcccaggttttgtcaccaagtgatcccaatttggatatacttccagcaaccgacgaagatactgtattcttaacagcaggaaaaattgatgatttcaaatttaatatcaccaataataacaatcatccgattcaaaacactgcggtaaccctccctgtgaatactggagctttagaaatactcgaaaattcaaaatggaatctcgatatggtaaaccctaaaaccaccgtacaatatccaaccaaagtatttgcttcaaaaactctgatcaatagtccaatgtcttttaaggtaagtgtagagtacgtcagtaatggtcagcttaaattaaattcttttttcatcggtgcaaatgtagtgggagagatagaagtaagcataaacgaactttcaacagataatatcggtggaactttaaatgtaataggctatctcctaaataagggcaataccggcggtttgtttacgacgattgagatagtaacagaagggaaataattgatagggaaatcgaaaaccgtttaaaaactggacagaatgttagtaacctaaaaatagtaaccccagcctctacaaagtcagagtatttgggtgatctagaggaagactcagcactgccgttcaatattcctcagtccactagtaataagtcatcttctggaagctacctagtaccactcaaacttgaatattatgatgatttaagaaatcaatatgttatttatgaaagcgaatcgtatatggcgctttaccccagcaacttgttaatgaaaatcagggcgtcggcttgttattctctacatctgatccaatgggcttggttatcctagtcgtcctcataatagtaatcgtaataatgagatttttgcgtacaagatcaaaaaagaaaaaaaatggctaaatcgaattcaaacaagaataattcaaatttcatagatcaacttgataatgtaaaaaaagacgatgaattgcagaagaaaaaagatagtcaagagaaaacttgacatcttgagctcgaacaatgatggtgtcattgtctcagaactctcataaaacatcacttaagcctgacggttcaaccatccaccttttttaaccaaaaaagtagatgaattaaaggctttttatcgggttatttatttttcagaacatcctaattctacaaaacagaagaaagtatcactcataatcaatttttacaacagaacagaagaagcaaatagcagaataaaagtcagagtaatggtaccaatactcaataatttgaggagtatctcataacggtaagtgaccatagacttgctgttatttcttttattatatttgtagagtctagaaattctaatctctatgtagcttaggatgaatggaattaatgagaaaattagagagaaaggagttatattgtttgtctgaattgcaaatcccgccagaaatggtaacatcccccatgataatgcaaaccaataattcttgtgaaacattcccttaaaaagctcaaagttataggcaaaaagaaaaaagccttctataattccaataaaaactaagattggagcaaacaagagagcataatatatacccagtccgtaggaaaagcccaaacaggccaggatgataatccatgactgcctctttgtaaataggtctccccatggctttatctttttggagccgatattatcagccacatgggcccctattcctagggcaatgaaataaattaaaactagaatggcaagtctctcaaagtcagttgaaccggttatcaagctgccccaaacgacgaaggaaatgcacatgcctgtatatggaagaaaaagcattccacaaaacaatcgaaatctttgaggaccaaacttgggtacaaaccactcattcagtctagagtcttcattcatctttaaacgctgatactattgcagaggtttcaaacgtttgatattccttgtgtatatggccaaaatcatttgacttgaggatggaatctatttctgaatcccaatggttgctaatgattagtttgtctagtccgttgaaaacatttgtccatttcttatcaagtttccaaagagtcttgattattctaaaataaattttccaagataattgattagcaggtttttttggataggtaaaatcgtgaagaatcagttgccccttttgtttcaaaactcgtctgcattcactaactaagatatttaagttaacatatttgggcaaataagatgctacaatacaatcaaaacatctattttgaaacggcaaaaattcagctgaaccatttatggaatcgatctcaatctttttctcctctagtgcaataagatattcaaacgtcaaatcaatcccatatacaaagttgttattctgttttaataatgaggttagaattccagtaccgcaagccatttccaaaaccagtgacccgttgggtacactctttactatttcctttttccaattcaagtcctgtcccaatgttgcaagtttcaccagcctatcatagctaccagagttattcttgttgaaaaagctctgagctaatctaactcccattgccatatccatgtcatgaatatcatgcaaatctaatattattggtggttaattttcatttaaatgcaattagtaaaaggattaaattattttgaattaattatcatgatatgactcaaattaccaatgtattatatatcgtcataattactatcgctatgtgtgtgggtgctactctactaaccattttggtggaccattcttttgatgtaccggctatagttgaccagattccccatctcataattaatcaaattcttcaaatgtaatgacaaattagaaatctcatggtgaagacgagcaaatcaaagcaagaaaatatatcggatattacagaacacttttacaaattaaaagaattacccagagctggatggaaacagaagctcgagattgaaaatgtagaatctgttgcatcccatacccttttaatgatagttttggtcttttttttctcagagaaatacagatattcttgtaaaaaaaaagtcagacttatagaattggctttaatccatgatctggccgaatcgattactggagacattactcccgaaactatgactaaaaatagaaaaagaaaactagaagacgaagcatttggtaagataacagataagatatccgccaaaagtttgaagataaaatatctagaattatggcatgactatcagacaaaaaagtctttcgaatcaaagtgtgtccacctccttgataaacttgaaatggtgttacaagcaaattattacctaaataacagaaaaggaattagaaaagaaaatgttagaccctttttccagtcaggctcgtcatatgcctctcacgtaccaaactcacaattaaccaaaacccccaaaaaaaatttgcgagatatcaaggaattagaagatttaaaagaaatattagagtactttagtaattagattatgcaatatttcgttgccttaaaaatcggtgaaaagagggtaaaaaatgcacaggaattattatcaaacttcttatccgatggcactcctgcattaccagcacttgcgttgaaggataacaatagtaacaattgggaaccagtaggagaggagaactattttgccatagttcaggaggaccaaggatatttgatcgcgatttgtgataagaatggtatcgctaaggcaatagctaactggttttcacttcaatcaaaagacgctataaaaaacaaaatagtagaaacgggaaacattcaggaatattttgggaaagtatcgttaccagtgtaaaatatatcctttttaaggaaaggaattttaaaaagcataaataattattacagatgggtaaattcgaaaaggagatagaagtaaagggtcatttggttgactcctcaatacttacccgtatttttgacaagattatggatttaaaaggcgatttcacagtattggattttcaaataggaaagagaaaagaagatcatagctacgctcgtttggtgattagaggcgatagcgaaaatcatttgacaaaaatattagaatacttgtttcgtgagggtgctactagtgtttcagttgatgaggtaaaatgtattccctcccctagagatatggtcctacctgatgacttttatagcaccacgaataacccaacccaactattttaccataaagaatggataaaggttgaaaacatgatgatggacaagtgcatcgtcttaaatcccgacactaaaaaggcagaatgcaaaaccaaccgggatgtaagaaaaagtgacctggtggtgactggtgaaaggggaattagaattataccccaagagagaccaagagaaggagttgacatatttcagtttatgagtagctcaagttccagcgagcgacctactcagcaaattgcaaaaaaggttgcccttgacttgtatcgtacaaagaaagaccatgggaagatagttgtcgtatcgggacccgtggtagttcattccggagcatcagacttattggcaagactcataagattagggtttgtagatggaattttagctggtaacgccttagcagtccatgatattgaaaatgcattacttggaacgtcgttaggaatgcatgtagatgacgggacacttgctgtgcgcggacatcgcaatcatatgtccatcgtaaatgaagtgtttaaagcaggatctataaaatcaatggtagaaaacaaaatcctaaaaaacggcattatgtatgaatgtatccgtaacgatatcccatttgttttgtgcggttcaataagagatgatggccccataccagatgtcattacggacattgttgaggctcaaaaagagtataaattattgttgaggggggctaatttggtaatcatgttgtcaactatgctccattcaatcgcagttgggaatatgttgcctgcctctgtgaaagttatagcagtagatattaaccaatcggtggttactaaattattagatagaggaacaactcaagcgataggtgtagttacagatatagggtcttttttaccgattgtaatgagaaatttagaagagctgggaagcatcaaataatacacatcatgggatgaaaatatttcaactccttcttaatagactcttttggaatttgtttaagcaagaaagtatgatttggttagaattattgaatggtaaaaaggcaatcaaaaagatatctaccatttcgagtcatttcaaggaatttccaattcgaatatgcttacaatattgaatcaaagggcttactttcgaatttatgaaaggagaacaaaattttcaaaacttacaagaaatcctataagggaaaatctatttttaatattgaatgatgatgatctagcaaaaggggtgtaacaaatgcatagtttaggtactttatctttgcaaatctaaagaaagttaataatacctaatttaagttgtaatccaataattttcccatagaaattatatcaaaatgtataatcacgtcgggctgattcacttggcttggtaccgttatgtcacacatctaattttacaaacctgcgatcacaagtgtatcaaaattaatgttaggcttctcaatctaccgtctggttataattgtcaattccaattgaattagtactcgtcatttttcatgacttcgttatctatgaattttattaatttcttatcaaatatctttgtagtctggttacaaataacgcatctaaaatagacttgagatcttcttaccctaggtcttgtcttagattccatatgtttcactatccaatcctttggggacctagtcttgcaaccaggacaaacaataaatgtagatacctcatctaaatcgtttgaaatggacatgtattacctaatctaatgttaacccgggtatttatttatgatttatttcgcacaggaaaaacttggtatctatttaaatggttttgattgagcccacagaaatgatggtttaatcaatatgctacgtcctataccattcaaagtctcatggttaagcagccaatcattatgcatctcccttaggatttgaaggttttaaccacaatataactaacctccatatagtattggagaaagaaacccttcactcatcagaattagtctcatttctcatttatcacaatactaacttgatgtcatgaaattcaaatcaatctttttctagaccatcctttatcaatttcaaagcaatttggggattaactctcccccttgtctctttcataactagccccaaaacataatttttgacgtttgaattattttttgattgttcaatcaattgtggctgagaatttaatataccttgaataatcttgatgattgaatcctcatcagaaattttttcgatttgcaaagtctctattatcttgaatggacttacccctgtttcgatgctcttatcaaatatttctcttgctatagtcctgttcaatgatttttcctcaactaattttgccatttcggctacctgacttggtgatacagaaagaatgtctagaccccttgtgttttgattagttaaaccctgtctatctttctcatttatttttgtaagcagctcatttactatccaatttgatatttcaattggagatttttggaatcttagcgattcttcaaaaaaatcacttattcttttatcattaactaaaatcttggcggtgtgctcggtaatcttgtaaacttccatatacctattcaacctctcaattggtatttcaggcatactgcttctcattctggaaacgaatttgctccctaaaataattctagggatatcaggctctggaaaataccggtattcctcctcttcttctttagatcttgcaccgacggtcacctttcttttttcatcccaatgtcgagtttctgctttgacatcaatttcatgcatgatcaaagttttttgtctagtgatttcataatagattgatttctcaacctctttaaatgaacttatattcttaatttcaaccttctttccacctccgacagaaacattaacatcgcatctaactgaaccttccaaacttggatcggttactcctagatattcaaataggttgactatttcatttaagaaggtcctaacggcgactggactagtaaagtcaggctctgttacgatttcaactaacgatacaccagcccgattataatcgataagggagtaattattcgcagcggatttatcttcttcataggttatttttcctggatcttcctctaattgaactcgggtaattcttattttactcctctcttcactaatgctagactggtcagttttggattttgaatctcccacaaattcaatcgatccctcatagccaatactgcttaattcataggaattatactgagtcgtctgataatttttgggcaagtcagggtaaaaataattttttctatagaatgaaatctctgcaggaatgttacaattaaaagccatacaaatcattgatgcaaattcgactgctcttttgttgagcaggggcagagtgcctggcaatcccaagcagataggacaggtattttcattcggaggagaatttcggtaatttgagagacaatcgcaaaaaagctttgtgtgaagattagttagttgacagtggatttctaacccaattttcaaatccgggtctattttcttgctattgttcatactcatacctttggaatccaagtctcaaaacctttaacattttcaagcaaaacagccacatctattaatttttgctcgtcaaaagcattcgccattaattgtaccccgattggaaacccctttttagataaaccacctggaattgatattgctggtatacctgccagattagctaatattgtataaacgtccaaattatagtgctcagtcgcttgcaatattttttcccctaatttaaaaggcatgacaggcatagttggtaaaatcaaaatgtcatatttattaaaaaggatatcgaactctctttttatcattgatcttaacttttgggccttggcataatatttaccaaaataacctgccgataatacatatgaacctagaagaattcggagttttacttcatcaccaaacttagacctagattcagaaaaataactgttccactcataaccttctggactaccttcataaccataccgtatattatcgaatcttgataaattactgcttgcttccgctgtagctatgatataataagaagatagagcataatttgataaaggtattctggtatcttctgcttcaagaccatggtcttcaagttctttcactttattccttgtaattttagctatttcagtctctgagtcttcaattaattcattaagtacaccaattttatacttttttttcagaatattgtcaacactattagtttgatactcatattttttatggactgtggtattgtcttttgggtccgctcctgaaataatattgaggagcggaaccagatcataaatagttctggcaattggtccaatttgctccaatgaattagaataagaaattaatccatttctacttacacttccgtaagtgggtttaattccaacgactgaacaaaaactggacgggcatctgatggatccacctgtatctgaaccaagagataatggtatttgtaaagatgcaacagaagccgcacttcctcctgaggaaccaccagcgacatattcgaggttccaaggatttctaactgggccaaatgaagaatactctgaagtagtccccataccaaactcatccatattcaatttgccgataacaataccaccttgttcttcgatcttgcctaccactgtcgcgttatatggagagacatattcagatagcatacgagaagcacatgtattttttagaccttgtacgctaatattgtctttaattccaactggaattccagccaacaagccggtcttaattccttctttaatcttcttatcaatagccctagactttgtcaaggcattttcaaaattatggctaataaaggagtttattttaaggtctacatgctttatcctttcaataattgtcgaaatgtactcctcagcagttatttcttgttctttaatctttcgtgaaactacgaaagcaggtagttcataaagggtcttcaagatcaaatccttggtccgacgataaaaccatctttgatattttttaatttaaatttaggttgaggtccttccgacgattctaaagctggtctaggattatcatctcgcaagttttcaaaggccatttcaaattttagatcatcgatgataagaccttcagaaccctcagtagtgaattcatctaatttgtcaaacattaatagtacttcttccactttcctagagatttgtgtaatattttgctcaggtatgtctaatttagctagatcacataatttcttaatgtcaatacccttagccatggttagttatggggatctaacgttattttatatttatcttatggggtaagcctatctatgtctcttggataaaaagttgcgtctctaatattttccagttttaatatggccatcaatagtctttctaacccgagtccaaaaccagcatgtggaggaactccataatcaaaaaccctcagatgataatcaaaagccttatgacttaggcccttttttttcatattattcatcagatcagccttattattgatacgtgtactacccgatgataactcaagacttccatacattaggtcaaaggattcgcttaatatcccaggatcatctccattaattggctcagtcatttgatccattttctttgatttcacatagaaaggcttcgttgaagcaggccaatcagtgataaaataaaattcatctccaaaaagatccttgagtagttttggcgcaatatcatctccccagcgaatgtacttgtgactattttgtaatttttctactaattgcgagtatgtaattcgactgaaagggctactcacattcggaagcttaattcccaaactctcaagttcgacttgatttttgtcaccaatactttgaataacatatcgaattaaattatctagataatccatcatatcggaatagtctacatatgctttttccacatcaactgacattgcttcagataaatgtctgtttgtcctagaaggttccgctctaaatataggagctatttcaaatacattttcaaaagccatggtcaactgctctttgtataactgtgggctttgtgccaaaaaagcttcccgatcataataaaagattgggaataatgcggcacctccttctgtagcagtagcaatcatttttggagtattaacttcaacaaaataattgtcatttaaatattgcctaatagaatttaggatagtattccttattttaaaaacattttgtaaatgatttctccttaaatctagagcccttaggtctaatctagtgtcaataccaattgaagaaatggattgggtaaggaatggggcaggtttgttagaaacagataatattttgatctcttcagggataacttcatattccttgctcgaatttttttgttcaacaacctttccccttatagcgattgaagaatgttctttcaagctttttaatgattcaaatatattttcacttaactccttccgcttcacaagaatttgaatatctccaaatctatctcttatttggacaaaaagtacatttccatggtctcgttttgaagatatccatccaataactgtaacaaccttattgattacggaatctgaaatttggaaagaataatgagtccttcgccagtcccccaattcagtttcagcaatgattttgtcttccaatatgatacaatattttcaaatttttataagaatatatctttttcacctcaaagaggtatgcataaaacttgcgcccggattagacctttgggcaaattatctcaaatttgtctgacggttggttggataccaagcttagcaaggtattttagttgggattcttccattcgtagaaactatggtaatcctgtaataataccccgcgtgcctcaggtctatttgtgcaatagagatttcaaaatgtacggcgattgatcctaacaggaagttggaaatatgcaatgggggaacagggaaagatgctgaaattaacaggtaatggatcttttgaattggaacttgtcattattgaggtattttatgtagttttttaatgaaatgggtgaaaaaatgtaaaatatggtcattaacatatccttttagaaatttcaatgttagaggtgattaagatcgataaatttatgataaatgttggttcgtgccgcttcgcctaatgtactaaacgaagatagggtgaactaatgctatataagcacatacttataatggacatatataaatggttaattcattatgttatggtatgctagtgtgtcgcttttatatatcaagtgaacaaattgactggtaaacctatactcggaatatattcacaacccactcataagtaaggttctgtgccccatattatgccggctgagttactttaatccacgtccctgatatgtatacttcatcgtccttgccgtcccaaatttgatgatatcattatagcacaactacactcacctacttttgcctgtgtccatttttcataaaatataggattgccttcgaggcttagttcgctcaatttacatacctcctttttgtaaatatatccaaacaaattcagccaattcttcacccgataaagaatgcagacctaatgaaacatagtaaaaattcatcgtggtgtacggttctatccaggatgtattgaattcaacttaatgcagggttttctctaagaggtgttgtaatgttctaatttgagaaatctgcaccttggtacctaatgtcatccgttgtctccggatattgaatatataccttaacctttggtatttcatgataaagtacgctctaatgtcacttccgtgttttttcccttggaaattgatagcaagagaatttacttgcttattgacaatttgattgcaatccaaaaccacatgtatctcgcattcccaactctgaccatcttttcatcaaagataaactatgatttccttcttttctttgtcgacaggctttgttgattttatctgcatcccgtccaatttttttagatgaaagaacgtgatttcgacttacaaagtgggaaaacattcatgaaacaagtataatggacaaaggtaacagtactattgcaggctacgaccaatgtgagattgtgtcaaattccttttctgttattctcatatggtttagagccttagagccataaaaaattttgtaaatagagtcgaccacgtagcttagttcttttagaattgctaactaatcctttcaaaccagttatttttttttgcttattctcttattaattatgaaatgtgaataaatacctattaagattccaaattttcaatctttctttatccaccgctgttatatttcttctttctaaacgattatcaagttcatcagaactccaaaatttttttaaacaaatattcaaatacggttagagctaaataatagtaatgggaaacgacaatgtcactcacgtaacaactggaaattgggatttagaggtcttaaaagctgacaaaccagtttttgtagatttttgggccgaatggtgtggtccatgccgaatggttggcccagttgttgaacaaatagcacaatcctattcagacaaaataaaggtggtaaaattaaatgtcgatgaaaatcaagaaattgcaatgaaatacggtatccagtctattccatcactattgattttcaaaaacggaaaggagataaaaagaacaataggtgcagccccaaaagatacctacgttaaattcatcaatgaggcaatctcttcataagtgaaaagttttttttaaatattttgaaatgatttaaaagcattaatattcttaatacataaattatttttaatttgaataaatccgagcttctttcacttttctcctcagattatgaaaaatattataaagtttcactatttgaaaaattaggctttattcgtcagagttgttctatttgtagtaggttcttttgggccattcctctacgatctatttgtccagatcatgaaaactatacatttattggaaatccaccgactttcagaagatatagttatactcaatcgtgggagaagattagggattacttcaaagaaaatggtcacagtatagttaacaggtatccggtagtatgtagatggagagatgacctttactacaccattgcttcaattgtagattttcaaagggtcgccgataataaagtaatgttcgaattgcccggtaatccactagtagtccctcaaatgtgtttaaggtttaatgacattgagaatgtcgggataactgggagacactatacctcgttttgcatggtagggcaaacatgcgatgcagattccaagggaggttactggaaagatcggtgtatagatctggattttggattattggtagatattttcgggatatcccccgctgaaataacgtttgtagaggatgtatggattggtgcgggggcatttggtagctcacttgaatattttgtaagggggttggaattaggcaacgccgttttcacagaatttgaaggtaatgaaaaaaatcatagggttcttaagaacaagataatagatatgggcgcaggtttagagagactatcgtggataacaaacggaaccccaaccagctacgattgtacttttgaaccgatactaaaaaggatatacgaaacgtctgggatggataattcatttaactcgaatagaaaaaacaattctcaatccaaaatcctttcagattactttagtagaatttcagcaaagttggaatcgacctctgatattttgcaggtaaaaaaacaaatagcacaagaattaagtatagattttgaaaaattacaaaaaattgtagtcccgtacgaatcattatatacgattatagatcacacaagaactctagtttttgctataagcgatggctcattaccttcaaacgttggaggtggatacaatctaagagttatccttagaagaacactttctctattgaaacaacttgacatagggctcaaagtcgcagatatagttgatatgcatttgaaccaactacaaccgttatacccagaattaatggagtacagaaatgacattcatgaagtcttggatatcgagggcaagagatttattgagacacaagatagaattgttacaatttcaaataaaataaaaaaagggaaaaccaaattgaatttagatgatttgatccgactttatgaatccgatggggttactcctgattatcttgttgaaaacggacttctcgaatcggttccagcaaatttttacacaagactctcggaattacattcaaccagtcggtctgaaaaaggagataaaaaagaattcaattttgatgataatgttgacattgatagtatcacaggaacgaagttattgtattacgacgacccaagtatttattcttttgacgcaaagatattaaaaataattaacaagaatttaattgttttagacaaaacttgtttttatccaaggggtggagggcaggaacctgattttggctatattggttcttacaaagttgataacgtggtaaaaatcaaagacaaggtccttcatcacttgattggggaatttgaacaaaaagaaggagatgtcatcaaatgtgtgattgagaaggagaggagactagccataaccaaaaaccatactgctactcacataatcaatcatgcatctaaaagtgtcctaggttcatgggtttggcaaaactctgcatacaaggacgaaacatatgccaggttggatattacacatcattccgctttatccagggaagaaatgcaggaaatagaaagaaaagcaaatgaaataattagaaggaatttgccagtcatgattaatttttacaccagaggaatagcagaacaaaactacagctttagaatctaccaaggcggtgttgttccatcaaacgatgtaaggatcgttaacattggaggattagatatcgaagcttgtggaggaacccatgttttcaacacaggcgaattaggtcttatcaaaataataaagacagagagaattcaggatggagttgttagaatagaatttgttgctggggaaaatgcactaaaacgtgttcaagatcaggacaaccagatacaatatattgttaataagctgggcactaatcgagaaaaaattttagaaacattctcaaaaaatattgatgaattagataaatcaaagaagaaaattaaaagccttttaagaagaatttcaattgcatctgtggatcaaacaataaaggactccattgttctcaaatcagaatcagatgaaaatagatttctgaattgttattttagaatagacgaagaatttgatgatcaattccatcttttggttggccaaactacagtagaacaaaatccagaacttgtttacatttcagtaataatcatggaaaacaaatcagcaaaagtcattgtcttttgtggaaaaaatgcaataaaaataattaaagcaaatgtattggcaagcaatctatcaaagatgcttggtggctctggtggaggaacacctaattttggacaaggcggaggaaatatgatagaaaatctcaaaggtcttgaggatatagtaagaaaaagtctgatagaaaaacttgaagacacaactaaatagattaatcatttaaaaaaagagattaatttactcgcttctttgcgggtcaagttgaggcattttttagatgtagaagaggtagttcaaatccgttaaatatgaatctaaaataatccagggctcctttcatttcaccattagtaatttaactttggtaaaaaaataattgttaccaataaataactaggtaactaatttctttaaatcgtttgggttatcaagtccacgtctgatttccattgctattcttctgccaacaccgaaagtttccccatatttatattttgtataaggcgttgtggtagctagaatcggatttcctgggactctaagggatacatcatagactattatgtccaagtctacagtaacaacactttgtagcgaaaagggaccaacaataccaggaggatattcctttaatgtacactgaacaaatttttcccccattttgaatactttatccaaaagagattctctaatactggccggtgtatggccgacttctatattctgcaggtcaattgccatttcaagttgatttacggcaggtattgaagtagtaaagtcatgtatgttcgtttgtagtcttcgttcaatgcccaaaaaatcaacatctccatcgagtggtgaataaaaataattaaaattgaaataagtacctataaggtattgttctatggtagagttatccttcaagtctgatgcatttattaaccctgcttcgattcgtttctcagattttattttatagtcttggtaagacgttactatgaaaaatgctctctcaagttttcttttggcttcctgaatcttgaccagagaagggccttcaatctcttctggagttgtatatatttttggcatagaaatatgagcttttcttagcaagtcatattgattattaggaaggtgtctttcctcagccttaagaatatatctgtttccaaatacaggaatttttagcgatttttcaatattatcaatccctaaataaactacaaatgatctgtgtggaaccaaaatcgtgttcaagccaagtaatttgttttgattttctgtatacattaaatcagaaaaattatctaaaactaatatttcatcagccagtcgactaaacttttgatatggtaactccctgcctttttggcatatgcatatggttctaaacccctcatctttggcaccatccattatttctaaagcagagtggcttccgataacccccaaagtaatattatccaaatcatatttgtctattagattacctacatccattttttaaattctcattccgggacgttatagttgaacttttttcatattttagttcttacttgtaaatttattttggtgtaccttgtttctttagctcttcatcaatggcgttttttaaatcttgatcatctttatttgagtaatcaacacccaatgtctctgctatcgattccagtttttctctgtcaatagattgttgtcctttttcctgattggatgtttcgtttgcaagggacttttttgcctctactctggccttctgaaattcactggttgctctacccattgatctagctaattctggaatttttttggcaccaaaaaatatgacaacgataactaaaattattattatccattccattccgtttatgaatgccataaaaattaatttgcaatccccattaataaacaaatattcaaaatctcctccagaatatttagctttaagaatgcacaggttttaatactgtccaaaatgtaaataaggttcttaaataaattgaatcatactatgaggtacaacgaagcagcatttatcggacagcaacgttcaagagccgcccaaatgaaattatttgattacgcaggatttgctatgttaacttatacaataaaaaaaagccccaaagatgacggctttctgcctgttggagaagatttgttcgttagtaaggcgatttatgataacaacataatcatatatcttacagacgaagaaggatatgccaaggcacaaaccaaacccatgggtatcaccgagggcgaaaagatattagataagatttcatcagacggaatgaaattttttgaaggagatttaaaaactatataataatttctgtccccattttgacattttcaagtatcaatttttcaatgttgtttatggttgatttgaatactactgttggtaaattggatctttctatcacttttaagcttatcagatccatcaagtcatatgtacctgccatagatttttctgattttaaaatgttaacacaatcttggacttttatcttgtcgtatttattggcttctggatttgttctaggatcagaatcatatattccatcaacatctgtagcgttgtaaaactttgttgcacctacacgttcggctatcagagctgaagttgcgttcgtgctctgaccaggataaatcccacctgttactataactaaaccggataagagagctacagagatttcttctagattcttaggcggtaggggataacaatatcctgccagacctgagatcaaaagtctcgcattcaaatgtgagacctggattccaatcaaatcaagtccggattcatccattcccaagcttcgtgataaattaatataaaatctcgctatctttcccccaccggtaataatgagtggttgataaacttggcttaatttttttatcaactgtacatagtcatttaattgagaagaggttgtgtcaaaattaaataaactcccacttaattttatcactatccttggtttatccatagaatttcatttggcaagtgattataaaaatcgttagaaattttggttttcagaatcttcaagtatagattcaaagtatttccttttttctggggtggtatatactctcatcatatcaagatatccagtgatgacattaatcaaaggtaattgatcaaaagacttttcatattctgcctgctcacttattatcatgatggaagtaacctcttccttctttggtgccaatgggatcgaaggagctctggaaatatccaaaaaaactggttccccataattttgattttgtccaataagcctttttactatagagatttgtttttcaaaatcaatagtcctactaagaaggcttctcgattgtatattgttacgctcatcttcgtatctctgattagtcaacgaaaaatattcataaatgcattttagtaaatttcgtcttttgtagtctcttgcaagcttcacagcaaaagtatccatagtttgtgaatttgatggtcgaaaattgcacaataattctaggatcatctcgtcatgcaaattaaaaaaatcctcaagggaatcaaaatcagtcaagtgcagagacttgttgagatgtttcatcgaatgtaagatcatgacttcgccggacctaactgttttgtgaaaatacactgatttgaacatttgatatcttgatatcagcattgactcgtatgaatataatgcggatttgtttatccccaatacttttgaagacgcaacttccagagaattaataattctaaaataatctatttttccatattcagtaccggaaaaataactatcccgtggtaagtaatccatcaaatctacagataaaccgccagaaataacttcatttaaaaagcctgaattatgttttccaaagcttaaggaagatatagtagcaggattatatccattttgtataataatatcagatatcttggtttccaagataatcctctctccgaggttttcgtgagagctgtttttagaatctttaagaatttcctcaaataaatgagaatatggaccgtgtcctacatcatgtaaaagggctgccaaccttagctgctggattaaatcgttatctgtaaagtatcccttatcatataacgtttgaccggccatcccagctaggaacattgaaccaagggaatgctcgaatctggaatgaagtgcaccaggataaacaagatgcgcaccagctaactgacgaattctccggagtctttgaaaaatatgggtatctattatctctttttctacctgggtaaattttatgtttttatgtattggatcagtaatttctcctacgtattttagagccatatttgttctccactctctttatccatgttttaaaaaatgctattgttctcctactatgttaaggattgatttaaaaataatatccttagaattatccgattgtaaaacattccaattaaatactttggccagttctagataattagttcttactttttctaagaactcatgatttttctcaaaatcgtctaggacaaaattatttgcaatacttcgtaaatatgaaacacgagggctcacatctagaactatagtaacgtcttcttttggcatgcctttatctaggatagacaaccattcgaagtttaagccgctggcaaggccatatactaaattggattgatagtatctgtttaagataattgtttttccagaccttaaggcgtttagaatattttcttttttctcccatcgatttgctgaaagaagtatgtgcttagtttcagcattgtattggactttgccatctaagaaggatcgtatttcttttcctattttggtagagtaatctggaaagctaaataattctgttagaccgggatatctatcattgaagtaatcttgtagcaaatgagcttgagttgttttgcctgatttgtcaaggccttctaaaacaatgatttttcccacgtgttccatgattatattttttccctagactttatcatacgtaataagggaaaaagttttaatttataaatcctttagattaaactacagcattgaaacttggatttatcaaacctgtgctcattcttgctagtatttttgtattgatatactttgcatttgccgctggattaataaatgcaatcatagaaggccatgattacaatcaggctgtttttctaccttctcgagcagtacaaaacaactatgagacgatgataggcattactttgttggtattcggatttgttggtgccctgatagctgtcaaagcatttaatgtagaaaaattatatgaaaaatatgccctattgggttcaggctttttgataatgatggtatctttaattttcatgtacaagataatggaattaaaggcctaaagaaaccgagttaaaatctgctgaaggttttttgatcattttccgagtatgcggaaaattaggaaaatcaggcgaggttttgtaagcggaactaggagttttctttaagatagtaataaacaagtcatccttatcttgaaaatattcaagtaaagaaactaaatttgaaatccttctgaaatgattattttcgtggtatggaaatgcatcatctgaaatagtttcagatattaatcgatcgatgctactttgtgactgataggatgtgattattactggtatttccttattaggatgacactcaaatagtatttttatcaagtttaagctcttatatcctgcgtcttttgcaggagcatgatgcaacctagcgatgcggtggggggccttcatatttttgtcattgttggtaatctcattaatcccataaaagctaaagtaatctaacaacccatttagtgaatctattactatgagtgaattgcatttatcatattcaataaccttgtcgaccatcgcactgtgggtaatttgataaggaagaaatatctcaatatcacgataaggatcacactttgaacataatgcctgattattttttagcgaggtcaattgagtgtcaaaatccattatcaaaatattccaacccctaaattcagtgattaatttctcaattaaggttattttagcattaatatcataataatacattaaatttattccacttgagattatgggatatagaaatgaaggtagtatttcagctcaccttaaataataatgcctaatctgatatatattgagtaaccaaggaaatatgactatttttgataaagaaatgttagacagtatcaactcagatttttatataaccaaaagaagaatctatttgaataatggttcgattagccctctccccatttcttccattaaatcaatgacagattttaatatacgatattccgaagttggtccagattctaaagagtttgcagattatatggacgaacttaaattggagactcgaaaacgggttgcagatctactaaatgggcgcgaggatgaagttattttcacccaaagtaccacagaaggaatcaacatgattgctaatggactggcttggaaaggtaatgatagattattaattaggaattcgttaaacgagcacttttcaaattatttgccttggataagactctctgcagaaaaaaacctacaagtcaggagtttcccagaagaaaaggtcgagagttatggaaattcactgattgagaaatttgccagtatttataataaagagacttttaaattggtttctacaagccatgtaatttataatgatggatcaatcactccagttgacaaaattggaaacattataaaaaaaaggaacaaagatactctattttccattgatggagctcaaagtgttggtgccatgataaccgacgtaaggaaaatgaaatgcgattttctaacttttcctggctttaagtggctgtgtgggcctttaggagttggaatactctatgtcaaaaagcaggtgatggaagatttgaatcctgtgtccataggatcaggaactgcagagcttgtatttcctaaaaataagaactcaaaggcaaataagagcaagaactcaatggaatccactaaataccacaagtatccagaaaagtatcatgctaattttaggaacttccccgggttggcaggacttgaagcctcactgcgatatctgctaagagtgggaatacaaaatattttccaacgcaacaaatatcttgcttcaatattgaggcaggaattaatgaaaatcaatgatttagtattgcatgaagcaacccaggaagaattcagatcatcacttgtttcattttcttttagaaaacaaaataatgccagaatccaaaaattaaatgccaggttacagttggaaggggtgattttggcagaaagggaaataggtacaagaaaaatcttgagagcatcaccacatttttacaattccgaagatgaaatggtaaggacagccaactcaataagatcattgataaaagttatagattagaataagcaggaggaatagaaggtagaaactcttactatcatcgttacaactattactttagctcgctcatatcaatactctattatctactatccaatttagataaattatttgaaaaataatattataggactagggatcaattaagtaacagaaaatcattaagctagttgcaatgttggtatggatggttggttggacggatatggagtcattcatatcgctattgtgaaaaattattaccggttcatgattatgtctcaaaaaagatactgaagtcactatgagagttgaccaataattctgattatcacgatactcaatacccttattgcaaaaacgttgaatttgtaaatttattgttttgataaattggcctggggtaatgttggaaactaagataataactcaaattctctagaatgttcaatagtcctttgtattttaaatttagatacaatataccataaacaagatttatctaaattcctaatttcataattgaaccgtttgattttagattaatatgatgtacttttttatcctgatttgttagtaagttagatttacctacattatcagattcatgaaaaaaacaatattggagttgaaaaaatagatagtcatcaccctgatattatctcaaattaagggaacgatcttaagttaccactttttttctatcaagttatcaaatagaaaagggatatagaaaacgatattcaaatcaacgtgattgcccttcaataactatcatagtcaaagtagagcgaaccttatctatttttcggattcgccatgtaataatttccctcaatttatccatattatcagatgatattcttactataatatcatagactccaaacactccgtttacttcattaacttctggaacctcctttattttcttaataatctcggcttcggaacctagatcacaatttaacaatacataagcagtcggcatacctattaaaagatggataaagtattaaatctttattaaccaacaattgcgaaaaatatcaagacactaattccattaaactcatatttcttcgctcagacatttttgattgcaaataattaatatacccatgccaaaaaagaatggtaaagcgggggtcgcctagcctggtagggcgtgggattgctaatcccatgttcgcaagaactcgtgggttcgaatcccactccccgcgccataatcatggattcatacaatggctttattagttcagcaaatgacaaaggtaatgttaaagatttgcaagatgcagctaacatacagatatgaaatcccttatcaaatttaagaatagacagattgaaaaaatctattgacatgatttgcaaatgtcaaaaaccatttgtcaaaaagtctcaagaagcttctagaatatttagtagagaatattgatactataggcaattttatcttgagtatttaaatcatttaatggttttactgtgtagctgacgttcctttgattagtgtatgaatacggttagaatttattctttgaatgttacttcaattatgcctttatgtatcttcacttcaaaaagtttcatggttatagtagctgcaggtaaaggaataacattcacaatataacctgttgcgcctaaaagtttaatggctagatagtcgccatatcgatttacattaaaattgtctttgtctgtgaatggggcctttaccttcaaaattaatatcgaaccatcttttacgaattcaaaaaccttatccgaataaaagactcttgatggatcttcattattaaaaattgcctctgcattctcccttaacatctcgattccttttagttctttctcataaaatctttcttctataatatgcaatggataaaaactggtttttgcctcttcaatttttgtactttgatactctacccactttgtaaaatagctattatggacttcacggggaaatattttattaattattaacgcatcaacattaatgccataaaggtttgcagacataagagctctttttgcattctcgatactaaatgtatctgggttaattattagtctcaaacttgtaattttgggatcaattattgtttttgataagagttcaagtcgctttagtaaattcatctcaatttgaattacatcagtaggaatcggtgcaaaagaagaaaaaggttgaaacatttttacaaatccactaaaaactcctgaaaacccggagagcttttctccaatatttccagcaagtttgggaaaatacaaatatctcaaagcttctccagaagctggcatatccataattatacaatcaaagtcttgatgacgtataaattcttcaatttttaacaatgaaaatagttgagtcattccaggaagcattgcaatctcataggataatgtttcatctaatcctcttctagagaatatcgatgcaacataggacaaaatagaaccataattttctgctaattcaagtactgggtctatttgtaatgcataaagattatccaataccttgacaggcttatttcctacgacggatgtcataaatgcatcttttaaagtatgcgcaggatcggatgatattatcaaagttttattatttagatccgcaagttttatagcagtagaacatgaattaactgtctttcccgttccaccctttccggtataaattattaatctcacaatctatttattttcaaaatgctttaaaagtgtgctcaaggaagtaagattcagcgtatttggaaacattttacctattggataaagtgtatcaaaaaacctgcacattgacaaataattaatagaataattcgctttaaactttatcacacatattcatttatgtgatattcacctgacaataaggtttctttatcaagtaaatgtttaatttattttgaaagcattgtaattaaagtctacaggatcgtaattaagtcccttacttatattaatcaatacccattgtatgttaccattaaatgcgactatattgtatgcttcatatgtaaagaatcattgttaaatgctttttcaaaaacacttctattctataatcacatttgtattggtttcagccttatccaaccaatcatctttgaggtgcggatcaagaattttacctacaacattcgcaggagaatacgccaatatcttgccatctttacttatgggtgttggacctaagaataaacatatggctttcccttcaggccaatacgctactacatcaatcgtcggattgggtattaccgccttaaaaccattttattttataaataaattacaacatatatagaatatatttgggtaattacggatagttttgtgtataaagagacacacttcacctcttttaagaaatttcaaatatctaattcgccaatgtcacttcatcgctatattatgtaccaacttaatgtttaaaggtaaactagaagaaatccttaactatatggctaagatgacttaatagataatggtatattcacggattggctaatgagtatgaaggagtttgtgataaacaaataattattaaattaacagagcctatatatcacatggattctaatcccaaacctcgcctggtttgaggaaataaaatataatcacactttcgattctcttgatatttactaactttgaagaattatcaagttttggacattttgttattgaacaaaatgtcgatcaaaatactaacacttgacaagtgtttcaagctcataggagtgattgattcttacataattagcatattcaaatgattaccaaaaaatcagcataaattctacggaattcaaaccaatgttgttatttataaataaagagataacttgccgacaaaatgttaaagacggcttattacgcaagaaatctgttggattacggatgaggcacaccaatcatgtttagagttgcacctggggctgttattactgttataaatactgttactctggctccaaaagcatttgagatggtaatagtttcccctgtatcagcaccaatacatcccaagtccatgccggtttgcgcaggtacgtcaagaaccaatccatctaccgtatgtccagcttttcctccgcactgaaactgggtagcaggagtaattatttgaatacccccatgaaaaacttcaacatttctggcccaaatgcaagtctgaaaacctgagatacttgacacatgaacactttgttcccaatccccaacgctaaaatagccgcggactattttgtccccaagagacagaaaattcctatataccgaggatgacactatcgaatcatttgttttattttcacttaggatggtttcgttagatgaggatataccatcacgtggttcgatgttggttccaaacaactgtagcaaattcgcctgatttaccacttttgtagaattatctgtagataaagccacggaatttgttacatttgttaaacttagaaaagagatttagtacttggtaatatgtgtcagcgacagaatcgttaagaagggatcatactctaattgaataaatgataaatgcgttaaagactatttcgttattgttaaagaatgcaaaacaaatacccgcccaatcattctagggattacatgatacttttctaattgctccttctttgaatatcatgccagaatcaacaagagaagacaaagaatacaagggtcttgatccttggagggtgtctgacacctggttttccagctatgacaaaccattagacaagttaaaattctttctgtgttatgctattttggtcccatcaggtcacaatactcaaccatggacatttagaatatccgatgatagtattatcgaaatgtacgctgacagaacaagagcattgcctgtggtagaccctgacgatagagaattgaccattagttgcggctctgccttgtttaatatgcagttggcaatatcataatttggctacagatttgaaacatccttgttaccacaagaagaagagggtgaccatgatttgttggctaagttagggcaatagacatcaatcaaaaaccagagaaaagtaaggatgaaggactgaaaagattgtttaactcgattacgatgagaagaacaaacagatttggatttgacggtgataaggaaatctcaaaagagattctctccaaccttcaatctatcgatcaaaaatatgaggatgtctggtttcatatcgagaagaacatggaggataaagagcaacttgctaaactgattactgaaggagataggattcaaatgtcagacaaaaagtttaggagagaattggctttgtgggttcacacaaataggagtcatctcagggatgggatacccggttatgcgtttggatttggtgatatcatgtctttagtcggcccgtttataatacgaacatttgactttggtaaaggacaagcagccaaggacaaggaacttgctataggttctccagctctgttagtaataggtacaagcgcagatgacacgctttcatggctgaatgcgggtctataattatcgaacatacttctgtacctaaggtctgaaaatatatggtgttcttacttaaaccaatctattgaagttccccatttgagaaaaaggcttaacagtttactacctggtcatagtgacccaaattcgcaattactactacgaataggctattctgatagagaagtattgccaacgccaagaagatcaatcgaacaagttatacttagtggagaacgcaatgttcactcgtaagattcttcaagaagaaaatcttgatattagtaatactaatacattctgttgcaactgatacatacttcgttataattggttttagtgatctgatttttaaccaacaaatagagagagaggtcaacacactttattctgcattaaaagacgtctcaaccaaaactttttcattggaacaaataaagaaccctcgagaacctgttcagagatactttacattttccttggagaaggaccaacagtatgtcagctatattaaacttaagtatacagaggagtttcatcaagacgaaaatcaaaaatggatgccagtagaaggagaagaataccttaccaccaagaggccaggtttcatttggattgggaaaatatcgttattacctttagtattgattaacggcattgacaagtattaagaggaaaagggcacattccaaataaagatactttctaattttacaatacctgatgctccacgaggaaaggaatgggatgagagtgacctaatgagatggcttgcagaagaagccttgtttccgactatgttattgccaagcagttatatacattagcaaccaggggattctgtttctgaaattttcagatccagactgcaagaaagaatattttatacctttttctaaaatatcaaaatctaaaattgtgtctaagtataccgaattggtaggtcgatataagtcaatttatcagaaaatttggattgatccagcataaagcaccctttttttacatttatttgttaaagggctgtcttaagatattattttaagaaacacagttaattacacatattaaagatcttcaattctaaaggagaccaaggaagtgatacggtaaataaaagaaaatctactgaagtggaagaataaaacggagatagttaatagaatcctaagcgaaaattgaactatatatttttaaaactaggtaattaatcatatttaatagtgaatctttatgttggatgctctggatggacgtattctggatggaagggtacattttatcccaagaaccttgagaattggcggagactatcatattattcaaggttttttaattttatagaagttgattcaactttttattatgttccttcaagatatatcatccaagggtggaaaaacaaaactccctatgattttaaattcacatttaagtttccacaggtaataacacatgtaaacaagcttgaaagagtcctcaaataccttgcatactttttttatgtattggaaccaatattagataaaacactgatgcttctgattcagcttccgtcgtacatgtcagcaaaggtaggtttggaatcactagctccctttttagataaattagataagagatacagatacgctttggaggtacgagaatcctcatggtttgatgccagtgtatatgattttctgaatgaaaatgatattacattagtctggcgagtgagagtagatttaaaaactccaacctttgtaacaaccgacactgtttatctaagattcattggcgatagaattgctgaccagaggaactttggattgaacataaaagacaaggaagacgaactgagagagtatgttatacacatcaaagatgcagtaaaagccaataatattaatgacgtcatcgttactttcaataacaattacgcaggatttagtcctcagttagctaatgattttctgagattgatgtatgaacctcgggaaccggttggttaatgtataaaacaagaaagttcatcaacaacttcatcattattccttacttctcacactctctttggttaaacgctaatccaagtggaatataatattcgaaaactgaatttatgatatacattcctctttaaattacttgttattcattactttcatgtttgttaggtgattgttgtcgatgaggaagacgttgctgttttaaaatcgccatccttgttacctattttgagtttattacatttgtattttatctaattaattgccttcgtttttgtggatttaaataaatagtctaggatgctatttagatgacaattgatttagaaattgatcatatagagcctagaaaaactaaataaaaaacatttattcatgattaaaattcatttttcaaatgattagaattgagttgtaacggaatctgtacaagatacaaggagaaaaggaatcaccttgttacatcccggtataaagaaggacagaaaagatgtcgtgtctgcgaaatttttattaaatgggacgaaaattcctattgtccgtgctgtaactataaattaagaacgaggtcctttcgaggctaggcaatgaggaagaaatatagagaattaactataacacgatattaatcattttgagattttttcagctattattctattaacttaattagtatattgaaccaatgaaattcttttaacatccttagatggtttgagaggagtcataattccagatgatgtatacatatttggagacacattcagaattgttgactcatgatcatttttggtgctttttttagatgcatttctactcgcaccaaatccgctcaataggtttatcgaataatctagtgccttcagtgaatgttcagaaccgtcaaccaatgccaacagtctcatatgttatgaatccggatacctgtttacgtccttgttctcggaagcttctttcgatattacttttccaaataatattgaattgagaattcccggtactcgtgacgaacctagaatgtagttgtttggttggtgattaaacctttagtagaaattttgttatcgaaaaattttgggagccttgacatttcagcaaagcgcgatacagcattcggtaataattttcatatcaattcgggttggatgaacctttttccttcaattactacgacttgaagtaagaagcatctaaacgataagatttaaactcggtccactccatatcgaggactaaattattgttaaattccctggctattgatatcggtacgtcaaatctttgatcataatccccaaatatcgttatctgagtatctgttttgcccatcataaaatccacaaagtcttcattcaataaacttacttttttattaaaaagagaactaggaaatctatctatagcagattcggttgtttcgttgttaaatatttcctcttcattacttaaatttgtagataccaaaatatcatttctatctaacaagtaccttcttaattcgttattgccggttatttgcattatttagttatcaattacgttttgaatttttgaagtgatctcagacattttattacttattaaagtagccaattgtttatttttcattttgcttggctgcaatagccttatggagagaatgtaaagacatcattataggattagaatttttttcgctagtcatatcatatatatacatttagtatctatttagggcgctgttaacttaggcgtctggcacctccttgttgtgtatttttacaaatagattcaaccagtttttgacatgatctagtttacacttctctttactacatggaaagtaatcgtcaaatccttcagttcgatccttgatgtactgcatagttctttcaatcagacttttctcaaacgaagaattgatatggtgttttagttttaggaatctacaagccattgggtaccaggttccaccgtctgttgatacgacatgttttccgtgaatcttgatcagacctgaaataaatctctctgcgataagcatgttcctctccttggatttattagctaagaaagagtgcgagaatttgcctattttctggttcgattgctgcccataaccaagagtattctgagccgacttttattaatgtctcatcaatgaggtattctgatatttttgttcttcttgttgaaacctttcgaggtttatacctttgaatccaattccaaattgcaacgtgacttctattgataatatgtaaaaaggacaatgccttggcagtatttctaagcgataagccaagaaagtacaaatacagaccatagtaaatatgctctgaagatgttttatttcttttacttaacataacagaaatagagcgtctttaagctaaagatttatcgttaagttaacagggccattatagctaggagaaaagataaatagcctcggaaattcatgcatatcttctacgctgttttattatctttcttcatgtatagattattaagccaataaaatactctgactaattaataatatattctgattcaacacatttagatacatgtccacagctaggacaactttcaagatttgaaaaattcttaccgaaattgtgatcacctaatcggtagatatttgaaatatggttaaaatcacatagttgacattttattcttagagtcatggtattttatgcaagtgcatagtattttagtcttttatattaaaactggaatatggaaataacattaaatattacatgttatcaatgaccggcacatgatatgaaattctgaaattaaactaatcttaatggcccaggttagagtaacgagaaggaatgtgagttatagaaagatagagtttatctttaatatttgtaattaaccaattcgactgaatcattataatgatttgagaattagtctattttggatactgaaaaacctaatctgtccaacattaaaaagtttgaagaaaatagatatcaattcattttatacaaaagatgattgttgacaagttgatcagatttcagctttatattcaaaaacgtaatctactaacgtttttgcaacctttttatcgattgttatggcgttattatttaaggatatcaaaccatttgaatttagccctcaatataacttttaaaactattaaattctaatctaccatctttaccaaagatttcatgatacaatgcacctatcgacaacccatattctttaatactcctatcatggtaagaatataattgaatacaaactctcagtatttcagttttatttggcagtggtaacttttctttattacctttaatcatacattctttccttatactaactgtctaattatgtatctcccatgttattcatagacaattagcaattcgataaaagatcacaaaaactgatactaacgtaaatttcaagagaattacaattttcgtaggacctaacaattcaggaaaaggcgttttactaaaggaaattgaggaggactttaacatacaagatccttaaatccttgtttcaaaattttcgaaaacttagagatttcgatttctcaagatgttgatgggtatgagaaatttgtgaaagatattcttaaatttaagataaacaaataagaaaattcatggttgatgaattctgattttttgataaatgaatgaaattagcaatcattattgttgagttgccatctgagaatgttgtaattcttggaacgatttttgttttggtataaaggattctattccagataccacaacagaataaggaccattgagttctatgcttccttcaccaacatatttaagtgccaaatctgaaatcggatctccgaatccaaattgaccgtgaaatacacacattgatgatgatgaaatattctgaatatatcctaatggtacactaaataggtcaggagccctaccggacagaatctgaaataatggtttagatggattttcttcattacaagggaaagtcactgctacatggcctttacttgcaaatggtgtagaatcatagaataataaaaattgattttgactaaaattcattccattaagcaaaacgggttggaccgatttaccgacatcagtttgatagatataattagtacccgtagcgatttggttatatcgttcagaatctaattctaaagattgatcgaatggattttttgaaccaataaatacaacgttgtatgttaacactgatgctatatacacgagaattacaaagcaagatataattaaaggagtttgaacatttgccatatgtaataaaggctaaaatatatactaataaatctttagaaaaactatatctattgctatatctattattgctaaatttgaaaaactttcaaataaaaacaaacaatttgttataaaaaagccattttgtgctctgttgcataattccttattctcggactattgcagtacacattgtacggctcttcacataaggaattctactagattgaagaagctctatttcatatgggtttagtaaacaaaacagaacacctttggagtacattggctgtggtttgtacctgtatttttcaggttgatcattaagaagtacatcgcagagactttcttgttttatcaatcgaaaccatgtttcggcctggaattggattcaaaaggacagacctcaaaagatatcagcacgaaggagaatgatatcagattacattgtgcatgagatgttaatcaaggttgggtcagaatacgtatggctctgggttgcgagtgaaccaaacaacaggcagattctcgcacttttctaactaataaatccaaggaaagaaacatgtttgccgcagaacattttctctcaaacatcgttagaggctatggaaagtatccagtctcaacagatggtgacacatggtacccaatggcctgtagatttcttagattaaagtatcatattcattcctctctggagtaaagcctgatagaaacgaatatacagtatatcaaggatagaatggagaatttcgatgactactttccctatagagcaaagatttgtaagttaaagcatgtacggaattggctgcggctttttgttgactatcacaacagagagataaaaccagttaaatgaacagagctcattgtactatattcttctaaacaggttatacaatgatacttttatcatcaactcttttaccatagtttgaaaatagcaaaatcataatcaatgtgtctttttaacatatcatcttcaggatccatgaagagtaatctaaattgtacgttgctgtttccaatatctgatgaattattatttgaatactccaaaataacctttaaacatttattgtttgtatagttacttattttaacggtatcactaatattcgttgatgcatatattaaagaaaaaatgataaaataagtgaaattatccatccggaaggaagattatttaaaaacgatgataaggcatttagaagcaattgatttgcaacagtatacatccgggaaaacagatatttaatttataatgtctttaacactaagtaaaggagaaacctaaattcattgttcgactattatcgactgtatacctaaaattagtaatagaactaaattctgagatagtattacacaaatctcttctcgttatgcatatgagacactctatgtgcttgaaagaagctttatgtcaaaagctcctataagatttggatgaatctgcgaatgaacaatcatcattatgtccattggtgaagccttatccttaattgaactgttaagttgtattaagccactttcaaggttattacgataatcagaagtttcatagttagacatcatatgatttagatagttatcaaatacttccaatgattttgcagctaagccttgagcgctttgatagtctccgatatttatcaaagagttggtttcactcgtcttgttgtccatgtgcatcattgccatgttagacatatccgttatatcaaagtcaactccataagcatatccataatttcgaagtacactatccaatagttctacaaatctcataggatggattaatccgttgctattatcctctttggggctaaatacatttgatatggacattataacttgatttagatagttagagtcctctgattttttttgtgtttccgttatggctatgattttgtctacatttgtatcaatacccgcaattaattgatttgattgctctagtttttgtttttcaacttgaaccgatgatggggtatccgaaaatgatgatgtcaggttgcgcaaattttctactgctattttaagatcatctctaatttttttatctcggtctgtaatttttaccatcagatcccagtaaaaaatattgacagctttatcagcatgattctgtgctagagatagattattattgacaaggtttgtattaactaaatttgattctgtctgaaattgatccaggtacgccacaaacaatgcattactattttgaggaaaattatgaccaaatacattttgaactgatgagtcataattaatattatttaaatgggctccgttaaataaaatatacaaaattattattagagataaggaccttttcctcattattatcttcatggcgaaatcacgtttgaagataataaaaactcatcattatcaatggttgcttcacaggaatgataaaaagtatatttgtaacctattactttaaattggttcattagccaattaccagcatcattcaataaatgtgactttgaatgtctggtatggaaaccagataaattagtcagattttgtcttaagttatctatagaaactctatctaatatcgattgagtgtttgggttaaccctacgaaaatttcccatttgactattgtgaaaattagtcttacccagtatgatcttgctttcttctgaaatagaattaatatttgtgtttttacacaattcaaaagccacctttagaattattacatatatgttccaatataagagcaaaggctttagataggtatttttgatgaaacttcaacttacatatctcttggataagtttatttgtctggattttggaattacttgccaatcccataccataatctattaagtatcaaacatataagtcttctttgattagatctgtggtttagtgctttaatcttttgtctgtgtagccattttaatgaaatcttgatagtgaactaatcccgctaaagaattctgagtatatatctcaaggagtacgatgtttacatttgtaagatgataatgtaaatcatctgtattattacaaaatagtgatattccgatatgcaattttttagataatcaaatttacatatttgaaaaaatcatgagaaaacaagtaatcataaaacaaacgtgacatacagaaattgtcctacttagtgaattcgatctatattaccacttagtggaaataccctttatatgcttaaaacatcttttaaataatacaatccccaagataacctaatggattcgaatcccactccccgtgcatcaaacagggaatgtaacgttatcgttatataatttgacgaataccatattcttatccaatatatgcctatgtcatagagcaaatcacaattggattatctaagccatattttaaaaaaatactaaaaaatcgatataatagtcgtaaggaaaatgccgaaacaatatgtgaatatattttggtctaacaagcagatactaatattaaaaatagaaccaaggagggtaagataaaagttctcgtctggctttccaactattttcagaataaaaagggatttcaagaaatgaggaaggaagacattaggtataatcaaatacttcccaaatggtaggcatagaggggttttcgttactgatttattaaaaaagcgtaatggtaaagaaatactttgagggtttttaccttgttaggaaacgaatctatcaggatggattggtaatagcgtctgaaaatattgatttggatatagctttggtaggtggataaaatcgatgccactatcattgtctatccttataatagatgattagtcaggtttaaagtttaattagtcagacaagttatcaccattctaattatgaccattttgaagatccttgttttactcatctgctcggaacaatcagtgaatgtattattaacaccgtggtcatttgccatcatgtttacttatgactgaatctaaaatctacaaagagacccaatagaaaatcttcgatacaaatttcagatttaaatagtatttcacgtttacaattacaatgtcagaagaacctattaacagaaacgatgacgttcaaggagatggtcgggatgcagccgaaatcgtaggagatagtttaaacgaaggagtagataaaattaaagcaggtgccaaagcagtggcaaaaaaaatagatgacccagataaagacattgggacagaatacaataaggaaaaacctattcatgtacaccatgacgttcaaggagatggtcgggatgcagccgaaatcgtaggagatagtttaaacgaaggagtagataaaattaaagcaggtgccaaagcagtggcaaaaaaaatagatgacccagataaagacattgggacagaatacaataaggaaaaacctattcatgtacaccatgacgttcaaggagatggtcgggatgcagccgaaatcgtaggagatagtttaaacgaaggagtagataaaattaaagcaggtgccaaagcagtggcaaaaaaaatagatgacccagataaagacattgggacagaatacaataaggaaaaacctattcatgtacaccatgacgttcaaggagatggtctggatgcagccgaaatcgtaggagatagtttaaacgaaggagtagataaaattaaagcaggtgccaaagcagtggcaaaaaaaatagatgacccagataaagacattgggacagaatacaataaggaaaagctagaggaacaagcaaaagacatttagaataatttatcacttttatataggccttatttgttattaaatttactaaagaatagtatattgattaatttgtcatagcaacatcagacaacgacatacatttcttgtctgtcaagtagcagatgccaaggtcaatggaacttgaaaaaagctatcctttagaaaatttgcgtcactttcgaaattatatgtagaaaaatatcataaatctaaattggtctaattacttggtagaaaggatgcttgacttcacgttcattaaaaaaatatatgattttcaaatgacggtactatgaggcgcatttttaccctatcaatgcttaaatgtgatatttttggtcataaattggaaatactatttggatttatttaggattcatttcatataccataccgtatggaaaacctttttttgaagaatttattatacatttgcttctgatgcaccaactaattccatcaagatcttgagtttaatattaatactaatttacaattccttaaattccataacattatctaaggatcatcgtcatgaactttagaaactatgtcgatggtgtatcatcttttctaaagtccaaaaacaacggatttttaatagtctttatagccattgttattacagttttagtagattctcaaatcggacttgttgccgattttataccagaatatttgacttcttcttttggtatatcattatttgttggtttgacagtattttctatcttcgcttctttctttatgataaattatgcgagacgtatcaatagtttaactgcgggaaaatatgctcacttcaaaccgatctattatcttgtattcatatcacaaggtttgatttcatcgattcttatttttgttgttactcaaatggcgatatatcaagaatatagtattattcctttattcatgattaacattattagttatgggatttggattagtattttggcactattgacaagggcttttattttatggtataagaattttaacaaaaatatcatgatactgatttttgccattgctatgatcctgtatgttatcaatggagtatttggactcattactcaaattgatacgctgactcaacaagatccgattataacttctaatcatgttgcatattttccagaatttagtaatttctctatgagtgatcaatttaatgcggtgtatcagaccgcttctatagtagcatttttgttgacatggataggtagcataaggttgctctatcagaatttaaaaagaattgggaagttcaagttttggacaatgatgatcatatctctaatttattatcctttatcctatcctctttttgtcctaggatatttcaatccccttggtaatgaaaatgcgatgcttaatattctaatattctcttttggaggtattattgcaggaattctttttggtatctcatttttatcaatagcaaggactttgaagacaaattctattgtccgaaatcagttgatgctaactgcgtatggattcttacttttctatattgcgggttcagcatatgcctctcaggctgcataccctccatatggactaatttcggtttctcttattgggttctcatgctacctaatttattcaggattatattcggccgctcaaactatttctcaggataatgcactcttaagatcaattaggaaatcagtcactgaacaagccaattttctaggtggtattggtactgctcaaagaaataaagagttagaatccagagttttgaagattgctaagaatcttgaagaggaaatcgaagaaaaatctggagttgaaacggcattgactgagaatgaagtggtcgattatgtacaatatgttatcaatgaacttcatggaaataaaaaataacaaatgatctcttaaatcgactgattattcgctgaaattgagaaaacttcactatataagtggattgttttcaaccttgaaccgtatccccttttccacatcaatcttgtccctttatttaggcccaccttcaacaaaaaatcgttaaccaaataaaatggacgctagggaaccagtaatccatagtaagcctaggataatacgggggaaaattctatatatcccattgcgattaggatacgactaactaacccttaaaacttagatgcatcaaatcaacttttgtcaagtccagaagagagtcaatcagagctagacgatcttattaaggtgacagataaatatttagatagggataaagccagagaaaaggctcgtttagttgagatttttaagaatgaagtggctttgagtaaacgatttgcaagcctaggggattccgacatggcgtggtttcatagaagattggaggagtctatagccatttatttagacttatggaagtagagtagggatggtactagtcagatggtaacaaactcctgagttagctccctcatgctattggtttggatgtagaatttgtacttgtggacgaaggtgagggtaaagttgtaactgttccacatgtttctgagataggcaggtatacttttgacccttctatcttccattttttgatattttggattgcatcttaaatatgcgaaaatcgctccaataactatattacggagctcgagttattcaagaaaatatggatgtcaatcccggttacagctggaagaatcgtgacgtcttatatgtatcaataacaatcactgcagtatttttgattgctatgtcagtttcaattctcagtgaatccactttacatcataacacagcaattgctgaagcgtacgctcaaccctatgtagagactgtaaagaatagaaatctaactattgatcttgagaatggattaaagactaacgctcaattaacttttcctgctattggaaaaggaccataccctggtgtaattatctttccgggcgctggtgctggttcagtaattacaccgtcatatggcaaggtaatattctatggacatctagctgagtatctcgcagagagaggatttgccgttcttaaatatgacaagaggggtgtgggacccaacctcacgatatcagatagtaatgcatggggcaatcttacatttgacaatctgaagcatgatgctgagaaggcattatcagtactattacaacaacctgaagtaaatgcaactaaaaaggccactttgattggacacagtgaaggtactaacttccctccaagaattgccgccgataaccctgataaagtcagaaatatagtcctaatggctccagtagctgaaaaatttactgatattatatatttccaggaagttgcaaaaccgattctttatgctgaaaacgtattgggtaaagatcatcctggacagttatcagtggcggaagcatcaaaagatcctatctttcagaagttggttggtgggaacctaactcaacttcttcttaacccgactaacgttactgataataatctcaccggtatattgcctgaacaaaaaaacatcacgaataatgacttgattagtattgcaggtgtgcttaaacctgcacttgtaagaggatatgaaaatgatacatccataaacgcctcccagctgtcggagaaatgtatatccctctacggttgccctagtcttggaaaatctttttctgctctccctagcgtcatcggcatgatagggaacgtatcttcaaatattggtgtccttatactagaaggacaaaatgatagccaaacccctcttcaacaagcattgttattacaacaaagattaacagaagcaaatcatcctgaccatcaaattattgtctatccagatcttggacataattttgtccctagcaatcaatgggtatcttcaggtggtcaaatagaagaatatgtattacaggatatgtatgaatggctttcctctccatcgagacagaaatagtcttctctattgcctacagtaggcattaataatgtggcaggtataaaccaaattcaaaatggttttataaactgaaacctattttgattagcatatctttcctaaatgtactgtgtctctttgtctaatggaatcttaccctttgggcccaccttttcaaaaaggttatctctatgtttgaatctagaatagcgaaacctgttttaagaccagtatcggcgcggatgtccaagcgctcaaactaaatgatactttatatagtaaagatattaggattagcataaaattaacccttcctccaaacactccgttcaatagaggaggagtattaaaacaataaattaataatatcgaagagtaactgcaaaacgaattcgaatgaattaatcttgcgcggggatcaggtatgaatcgctctatttgaacccgatccctctatctcaaatttatcaaccaaggttacggattgatagaccaagttaattttcacacaagattacaccctctttatacacttcctcacgtgaaattggttatgtatattgatagtaagattagaaaagattatcttttcattgtagcagttatatcgactctaattttctcaagtatgactatggtcaatggctttactaatgttacatatggtcaaacaaatactactcatcccattccaacaagcaatgttactataaacctggtaaacctacaggatatcccattacaaaaagtccgtgttggagatattgaaatggcatacaagatgtttggtaaaggtgaccccattatacttcataatggtattaatgatggcatgaatgcatgggacccttcttttctaaaaggtctttcatcaaatcacacagtaattatatttgatagtcgtggaataggaaatacaactgctggtagcgaaccatattctataaagttacttggtaatgatactgcgggtttaatggatgctttgaaaatacaggaagcaaatgttcttggatattctatgggttcatacataactcaacaatttgcaatcacacatcctgataaggttagcagtattacgctaattgctggaacttgtggtggaaaagaatcatgtacctccatcagaggagtttatccaattacaagagggtattatgaataaatctctaaataatatacctctttctcaggatgaaatgaaatctcttgtaaatgcctcagaaggatcaggatggataaaactgcatcctgaatctcttgatgttccaaaaaacatgacattccaacaaatgaaacctggtctttcatctgaaacaatgaacaatcaatataaaggtgcaaaggcttgggtggcttccgactggaatggtgcttgtgacgaccttgcaaagatagacaaacccatgttggtcatagcaggtacagacgataatgaattagtgcctcatgaaaattctttagtcattgcaagtaaagttccaggagcatggcttgtacagataaaagacgctggtcatgctataatgattcaatatccagatgaagttggtatggtattgcaaacattcctatctactataaaacaataggtgaccaagcaggaaagaagaattcaatattaattttatatgcaacgtaggtatgtgggatcgaaccaatctcaaaaaaaagtgcgaagtgcgggatttggatccttctctattggttagtgtcaaaattaactttggattctattcactcttgaaccatatccccccgcgcccaaactcactgttttgttatctggtaatgattatcaattcaaatcgtattttgcataggcttattatcatccacttctcagaaagaatatgataatcaataaaaaaccattatacttctagaatttgagaggcatcacaataatcgttaaagataaataaaatactttatagattttgatatgagtattctattttaagaatgcacttaatgcatcggttgctctctgttttaatgaggagtcagatgaggtagaattatcggttgctgattctgacatattatttgttctctgactattgtcatttcccgtgagtaactttgttgcatgatctttaagactggataggtcctgggctaatgccatttggcccaatgaaacgcttgctaacgaggctgtcaacacaaatgacagcacaaaacttgtaaaaacaaaaattttcttcatttttttcaaattgatatgttcataatattatataatgggcatatgattgtggctcattggcagcaaggaacattcgatcctaatggatttcaatattttatttatcgaatcatattcaaccttgaactatatccccacgggcccgaacccagtatggcaaacatatacaagattactatgaatgctttaattggttggaacccccttccgaaagacgtagattctaatcccaaacaacgtcagatctaatttttgaatattgttattaggacgatttattatatgtactaataacattcaatcaaatatctcgataaaaaaattgacaaaatgtttaaccaaccaaaaattcttcatgtaactagaaatctatgcttttagataagttctatttggcgatgataaaaataaaataaaaattatgatgttgttgttgttgcatctgtgctattggccattttgagaccatccaagtcaacaaaatccataggctgtatgacatccgcagaaacctcataaacagcaacgaacggttcaccctcgctagccattgtgcttaggaatagagaactgccaacgaacggaattgaagccgagaaataaggagggttaactccgtagtcaggtgtaattctagaaggagcgcttatgatgtcaggtacccctaattctcctttgtcattgtgtttaacagtaaacaattcgcttatttctttggattccatctgtgaatcggtagaattattcaaaggcactctgtgaccaaatccaacctctacaggttctgttgctgtaaatgttagaattcctctgtatgacgcaccatcgtctctatgtggcaatatgtttatggactgctgttgactttcttgttgtggaaaattcagatgtaaaggttgtttggatgcctccattccacggagatagatggtctgtccaggagaagcagccgagagataggatatctttccattaacggatgaagaatttgaatcgttagataccgtagtgactggttgcgctgatgcttgtagtagattgaaatctttaccactgctatatatggttattaatagcgtaatcacaataatcaatcctatacttgaaatgatattcatcgttatgaggatcattagagagaatataagtatagcgacaaggcgtttgccgacaataattttgataaattagtttagtacatataataatagatttattgacttctcattcgcaatcacaattcctttccttgactagtaagggatggaaaacaggaaaattacacaagatagaaatttgatgtctagtttatccatttggattatatcaagtgattcagacttatgtttcatacagaaacaacgtactcaatatgtctttcttgagattcttgcgtcattattctagattcactaagaccagttgtcagataattttcctttgacaaaagcgactgttgcctttttaattcagcctctttattaataatattcaataattcacattttatgcacataaacacaatatcacgattgtagtataaaggttttatttatatttagagaaaaactacaccagatcttaatatttagtaaaaattagcacattaaagtaaatttcttaaattatcgatattagttatatttctattaggaatattatttgcttaatataatgagtaaattttttgcattttatgataacttggggacatttaattgtgttcctttgacccactctaaagcgatttaattatgctcctactttaagaattctatatacatgatgctcttagctatcctacctacgaaacaaaccatatttgtgataatgataatagcaacgatcgtaacagcaggtctcttacctagtctaatttctggttccctgaaccaagtgatggcacaaggacaaaattccacagcaggcaattccacagcaggtaatttgacagaaacataaagtttaccttccgcaaacgaaactggagtatgccagccttgttgtattggacctcaccccggttgctaggggaacatatggaatatctttaattgcttattttcggatagacctgacagaaaagtaggatttgctaacacaaccggttttatcggcaactggaggtgggggccaaacaactttgccctagatccacctaatgccgtcctgattctagatgaggagatagaaggagaacaaagacaagattatgccctaaccaaagttaccaaatattaggcatcagatgttcctttgacacgagctttaccgcaaacgtagtgagaagaagactaactttggacaaatacataaaatcgttcaaagtactctctgtatgaaggtaaaatattaatacttgttatcgtccaattcaataagtatggtttatcaaaatccttaaatttgacaataccatctaaaataatagaacctcttagagaaccgaagtcggtattaatccccaccgccacagaccataacattattactgttttaagatttggttatgacatttgaatccaattatgtaaataaattcttggcatcatgttcaaatccctcattaaaatatataaatcgaatccgcgattatgtggtatggattcgaatcccaccgcgcgcgcttatattggggatttatacagcaattttaaaagcaagaaaagaaagtttctctaaaacaaagaatttgaaatatcttggaaataaatgagtgtaacaatgtagggagaataaagatataataaataataaaataatctcgacaacaaaatcataatcaaaaccatatttaaaaagtattctctacaaccttgctacagaaaatcgtccatggagtcaaggtaagaaagaactctattgttcttcctaaaaataataggctgaggaataaggaataaaggttacagttaacaaaatgttcatatatatgattaccaatcgagagaactttttagatatgattatggttcttcatcaatagttattaatagtttcctcattgtttcttgagaaggatctttactattgactaatagcaaaagaggattacataactatagagaaaaagatgatgattagactttttaaagcaagtttctgcaaccttagcgaaggtcataatgatttttggacaaaataagataggaaggtgttactacatatctgtagaaaataatattattcagatgcatgcagcaaatgtatccaattttatatcagaatcagattatgggattcacacaaatctaaaaaatcggaaaattcattttatgaataaatctaaaggggtaggggttcaaaatactaaaggacgtaataaaaacactagtagactaattttgtatattatccaacatgttgataaatctaatatgttcacattcatgttctgcattgcgtgtatcatgaaaagaacaatatagagtttgtttaccggtcataacttcaacattaagctttaacttattatcaccaattacaaaaacatgatcataatggtatttgagataataataatccataatcttctgctgagtaatgaattctagttcctttttctcctgcttcaaattggcttttacctgattatcaacactctccttcttactaatggcactggtatgttctacaatttcagagaggactccaaagtctcccatggttcctaatacccctgtttttgtttgaatttgcattcaattgaaaatagagaagtcttactatataatcttattgaacattctactattcgaagaaaaaacaattatttctgaaattcttaaacatgaatttaaatagatttgtttcgtcactacatagtagacatgtacttttgtgttttcttattggtgtctccgcccctgtatttttgagcatatttctagcatctttttctcccttggtgattaaatgtcctattgtagcaggtgaaagaccaaatgctctgtttgaaatcccgttgatgtcttatctcatctcgattcgcacaacctccccctcgatcttaaaccttccatttaaaagtgatgcaaatgttcgttggtttccatctcgagttttgctctgagccttctccttcttcaaaagggcttttagatcctttgtaaatgcatctttcttttctatattcatataattagcggcaaaatcgcttatcttttctactatcttaacataatctgataccatgatagacactttctcatcataggctgtcctatctgaaaggcctatgtcatagagtttagcctttaatccgtcaaaatcatctggaacatgctcaacatttttgacatcgccgttatcttcatcattattgtctttagaaggccgtacactaatgatgtaaacttccaaatttggaactttgttcttaggttttccccttcatcattattgagccctctcacgggtttcaaagaaaatttataatgaagcgatatttggtaaaaattacaatgaaatttaagatgcttttttgttggtgtttgtgatatttattaaataataataacaataataaaaattaataatcatcacacattcatttacgtattgtataaagattttgggaaaccatgtccttggtgtatgtcttgggttaatagtgagatgaaaatagtagtatcacaagtaaattggaataatcgaaatggactatttacggtgtatggcagggccacatgccgctattgtcaaaaaacaatgaatgggaagaatagattcaataaattcagtccggataataatccatcgaattggtggacggaatggaaaataattcctttggctctcatggagcatgctgaatgccccaaatgtggttcgaaaaatattaccacagaaaatattgagaatattaatacgaatgagggtatagacattttagtctcctttatatgtaaaaattgcaataataccaaatctcaaattattagagaatttcaaagtttatggaataaaattgaatctttcaaaataagttcagacaatatagaaatagttaaggatcattcagatgaaataaatcaatcttttaatgattaaatatcttagcatgaaatcaaacatataaggtatgataatttcatattagaatatctttcatttaaactcattagtgttatccgtcctttctgacttgatatttcggatttagacctcttagtcgactacctaaacatcttattacgctttaattagattaaagatccttagttggactgatcatatctacaggaactgactcaagatatagattatggtatacctatttggtaaaatcagacatattagattgatgtcggccatcgaattgagtagaattgttttcataacgctccaattcactcttccagtctatctcggacatattcatcaagtttaagaaatcattcactgattgaggaccaaatcccgcaaaatgattgttaaatgcaattaatacatcctggatccttgaattctcatcttgcgtttctctaacctttttaacatattcaagcatatctttatttctgtctcttactatctttccaaagtccatctctgaaatgcttctatcacctataaatctgatataaacctgatcagaagttattatggatggagatactagtttatcccttacactccaaaccaatgagatgtcgttctcttttaataaatcatatacattatcattaaaccatgatgaatgtcgcacctctaaagaatatctaaatcttttgtctagataacgaaacatactttgcaagggattaaagccttttttctctgaaagaaaaggcggaagttgtattaacaacgttagagttttatcaatcaaaggctctaatgagtaaaataatattgaaagaggtttaacaacatcttctaatttcttttcatgggttattactttgggaaatttcaatgaaaatttgaagtcttcaggagttttgtccttccaacctctaactgaagatctggaaggaatgcgataatatgtagaatcgacctcgacaaatctaaaaaatttcgagtaataagacaaatagtctttattttccatatcctttggataaaaattgcctttccaaccttcataactccagccagagcagcctatattcaaagtcaagtttcttgtaaatagatcaagaaagtagaaaaactttcaatgtggtaaaaaggccctgttaacttaacgataaatctttagcttaaagacgctctatttctgttatgttaagtaaaagaaataaaacatcttcagagcatatttactatggtctgtatttgtactttcttggcttatcgcttagaaatactgccaaggcattgtcctttttacatattatcaatagaagtcacattgcaatttggaattggattcaaaggtataaacctcgaaaggtttcaacaagaagaacaaaaatatcagaatacctcattgatgagacattaataaaagtcggctcagaatactcctggttatgggcagcaatcgaaccagaaaataggcaaattctcgcactctttcttagctaataaatccaaggagaggaacatgcttatcgcagagagatttatttcaggtctgatcaagattcacggaaaacatgtcgtatcaacagacggtggaacctggtacccaatggctagtagattcctaaaactaaaacaccatatcaattcttcgtttgagaaaagtctgattgaaagaactatgcagtacatcaaggatcgaactgaaggatttgacgattactttccatgtagtaaagagaagtgtaaactagatcatgtcaaaaactggttgaatctatttgtaaaatacacaacaaggaggtgccaaacgcctaagttaacagcgccggtaaaaatagtgtcaactatatatcagataaatattataagtgaagtctcacctatcgatccggtatatttttattatgtttcctaattcttgtccatattaggactctacatgtctaatttgataatacatacaatccctttaaaaaccgctatggatatagcataatttactatattgtatcttggcaccaaaatactctttttttactctagagattcttaaaaagaggtagttatcagactcgttgatggtttaacaacaattttacaaagtaatctatttcatcttttccattaattccaacgtctttagccattttattatccacgggatagcacttttagtagccctgtcgtgagggtagaccattctggcaatttgatgaattttttgaaaattaattctatctttttgtattaaacttatcttttttcttccattttcatgtatttttttgttattttcttgttttaatggtacaatatcataactaaagcatcattacttataaattaaacaaaattagagtctgaaccagacctgggatagtatgattttgaccgtcattttatttttaatttgactatattcaggaatgtttttccctatgcactttctcgacctagtgtagacaaatttagatattttaaaaaaaagcaataactattgtcatcgctatccactcatccgatcattgtagtagatgacgaactggaacttgcaactcttttcaaaacaattttaaaaaatcgaggacataatgtggtctcttttaccgacccggtattggctctcgaatattttaaggaaactgcggaaaaacattcattgataataacagacattagaatgtcagctatatgtgaaatagatctagcaaagactataagagaaattaatagtaaaataaaaattttcttgatgactgtttttgatacaacggattttaaagataacgagaattttcaaaaggcaaaaatcgatagaatactgcaataacacatccatttcactgatttaagacaaaagatcaatgaatctttatagttactcgatacagaataataaagataaaagccatagtataggttaactatgtttaaatcgttatagtcattgcatgactatctactattctttgttgaaggtctttggatatgttattaaaatccttttgatgatacatgcaaatgcccttaagattattctcaaattttaagggtagataggattcataatctaaaagactttgtagtttatgtttaaagagaaatgcaccagcatcgcctaatatagaaactcccttcttacctaattctttggcatagttgaccctttcttccatatttttccaaatagatttaacattatcatgatcaagatatcctcttaaagaatcaacaatgatcaatgatttctcttccgttttgagcagattgcggtcagcggtccaattactagatagtatttctctaacagaggtctctgtttcgtagaatggcatgatttgaatcatttcattgtcattgatttgtttttgaacataattagaataaaattctctttgggtagtaagatcacgatatataagcaaacaatgcagtccatattcactttgtgaaattgtctctgctgcttctctcggattcattaattgaccataattattaggtgaaattagatttcctcaccactgagttaattgtttatgattgcttattaatagtatgtatataatcaattaataataaaaatatgatatatttcattacgatttggaatgaatgtatatatcagaatttcattctgtattatcacattacccctggctttatattatatgtccaaatttaaaatctgaaaaaactactttatttgtttataaaagaattgcctgatataaaaaaccgttacaattatttcatcagtgaataagatttaaaatcaatttcattatttattgaaaaatataagcctaattgccctatcgtccattattactatttagaggatcacaactaccttaaattgatcaaaatattcaatatttaaaaggggcgatcctatatctgttcaaatcagattatctaatggccaaagcaaataatatttaatcaagaaaaacagtaagacagcatgtctctttctgaatcatttgcaaaaaaacatgtgaaaaaaatggattgatggctggaataaccatgatataaaaactgtgttgtctatgtattcggaaaatattgaattctctagccttaaatcaaaatagtatttccagatcgtaacgtatcaaaaataaatagtaaaaaaggcttggaagagtattggtcaaaagcgttaaaaaataacttccccagtctaaagtttacggataaggaagtattagggcataataataaaattatcttagaatactacgctaccttggattgcatgcataaaacttctgctatagagaagtttgaacgtgatagaggaatgataacgaaatctgacgtgttttatggtgcggaagaaaagatgaaaagggcattacctacttagtgttatttcctctccccccaatgcataatttatttgatttttttgtacaattcatccattctcaatctcgtttcaatattttttgcaaacccaatacttcaggaagtcatgtagaattccttaaatgagaactacaaatattcagaaaattctaaatattccacataaattctttttttatgacaattcttatatgaacgattacgctagagaacttgataaatcacagatcattcaaactaacaaataattagttaaacaattctatgattcattggaaaataaaaaccaagactttcgcaacttttgtaaaaacatggtcgaatagattacatcggagggtatgcctaggggaggtagatacttaggactagaatcagtttttggagaacattttccccgatatcctatcaaactttaacgaattccatgctcatccaactgagtttctagaaattgatgacgatgaggtcattatttttggtgcctatcatggtaagtcaaagctaaacaaatactttactgcacccttctgtaatgtgtataaaatccaagacaacaaaatcttacaattcaggcaatttacagataatgaaaaaattcaagaacttcttaaattttgataaaaattaatgtttattgttctctaagaaaacctgaccatatattgttctgatatgttcgattcagttttatagcatactacagctttagtgagcaaatcacctactttgaaaaaatacatctcaagatctggaggactaataactactgcgtgccccccttagtctccaacagtgattctatgagtaattctttttggaacaaatattacgtctccagacttacctgttactacttttttatctaagaggaatttataatcgccttcaaatatataaaaggcctctgaacctttagggtgcaaatgggatgtgggaactacattaggtgggtggatcacatccaaaatagtctattgaccatttgtctcagaagtaataactttaacagtaaaagtcgcaccgtgaaaatcaaagttttatcctttaatatggaaatttcctagtataaggattcatgttcttcaacccacattattgaaaataactattattgatagcaaatatttaattgtgtttataatttgtagatcacaaatcgcatagtcaaggctcatcaaattgaaccctggcaccataatttttttccagtaactgaatcaaaataggatcctcaatcccatcgttagtaaaatcatcaatatttgacgatgttatatctttgaaaaagttttcgaatcctgctggaatataaattaccaataactttccatttagatttccctttttttggaacgacctagagatacctttttctagttttaatactgttccttcggaaccgacaatgtcttgttgaccatatctaattttgaagttacccttaatcacataaactattacaatttccttgctctgaatatgtaaaggaatttcattctctacttcgccttctgggaattgtatttctaacattgaatattcacctcttgttttttctccagagattatcgtcttgaatataattccatttaggtcacattttgggaacgcgttttcattatttatattaaaagtattgtttttagatggtttattggaattatttgcaaccaatatcattatcttgcaatcatagaatttattcttttgggtagacatttacaattttaaccccaactccttaatttaccaatttcagaactaaaattaggcagaaccatggtttccattgctaaaagtgggagtattaattagaatggatggagtatacatatccaatattacatcaagttatgctttactattttgaatgatagtattattttttttagcagtattatctatgcccatataagacctctatcttgtgggggttagaaatattatcggttatgggcaatatttattatttttagatacggtatttaagcctcctcacagtaaacccttttagataaattttaagttaattgttaatggatttatttttaaaaaaaaacaaatgctttagaatgaagcaaaaaacaggtttagattttctcacgctcgtttggaaccttgataatacattgtactcgtaaaggtggaacttttagtattgtcgcctaccatgaaaaagacatactcaatagaaagataagttgtaacaccaggttcatggtatacatgtatcaaaaataaattaatttaattttattttctataaacaacaatttgactcgatggactcatctatagcccaaaggttcaaatcactaaatttgtttcttatcggtgttatcatgatttactgatgtaaaaacatttaaagcaatgtggagaccctgttaacttaacgataaatctttagcttaaagacgctctatttctgttatgttaagtaaaagaaataaaacatcttcagagcatatttactatggtctgtatttgtactttctaggcttatcgcttagaaatactgccaaggcattgtcctttttacatattatcaatagaagtcacgttgcaatttggaattggattcaaaggtataaacctcgaaaggtttcaacaagaagaacaaaaatatcagaatacctcattgatgagacattaataaaagtcggctcagaatactcctggttatgggcagcaatcgaaccagaaaataggcaaattctcgcactctttcttagctaataaatccaaggagaggaacatgcttatcgcagagagatttatttcaggtctgatcaagattcacggaaaacatgtcgtatcaacagacggtggaacctggtacccaatggcttgtagattcctaaaactaaaacaccatatcaattcttcgtttgagaaaagtctgattgaaagaactatgcagtacatcaaggatcgaactgaaggatttgacgattactttccatgtagtaaagagaagtgtaaactagatcatgtcaaaaactggttgaatctatttgtaaaatacacaacaaggaggtgccaaacgcctaagttaacagcgccgaatcgaataatctcttgatatctatctaaatgtaattcaaggaatttttctatacataatttgaatgagttagtttgatcatcatcacttaatcaaagcggatgagactacctcaaccaaggagttaaaatcaaagaaaaataatatttaaacaaaattaaaagaacattatgtaattctaatatactttcgatcccttgtatacttattaggcatttgtatgtctcattcctcatgactaatcctaattttcaagaatgttttttagactcgataaaattaagcaggaagaaaaaaggatctttgcaataagtattgtaggggagagaatagatgaacgataacaaaaaagtaatgagaaaattaaaactacaggtaagtatttcggttaatggttgtatagcaggacccaaaaatgaatggactggttaatttgctgtgatgattgcgtgaagtatatagacgatatagcagaatcagttgataccattctcctgggaaggaaaatgactgatgaatttatttcacattggtctaataggatgaacaaacctgatgatccttggaatacattcgctaaaaaaatgatgaaaacaccaaaaattgttttttcgaaaacactaaccaagtcaaactggataaatacagaaattgtaaaaggtgatctcaaagacgaaattacaaagttaaagagcaagaatggtaaggatatactcgtttatggggggcttcattcgattcttccttgattaaagaaaaactaatagatgaattttatttgttagttaatcctattgtattcggaaacggaaaaactatctttaaagatttaaaagagatccaaaaacttacaataattgaatccaaggtgtttgactgtggtctggttttgctccactatgaggtaaagaaaaattgaaaaattattgctattcgtagacagggttctagagatatttttaaactggattgttgacgaaatagataaaagatattttaaaaagttaaaatgataccatgttgggttatcacaaagagtcaagatcttgaatgattatattttacaaaaattcatagtcattgtggggagtatttcctatgtttctctaaaatatcttttatactttgacgcgtctctcgattagagtttgctatggattccaaggaccaatattttccattattgtatattaatgattctttttcagaattatgtattgcggtcgatacctctccaattagcatcacatgatctccaaatgtgacctctttgaataacttacattcagcgcttaacgaagacccttttaccatcagaacatctatgctgtcccccttatagaactgaaatcccaactcttctaaagcgccaattttgtcatagtgtctaccatcgtatcctccagccacgctagcgagaattgtttgatcagtcgcacatagactaattccaaattcttttgacattcttatattttcaactgttgtctttgtcggtcccaaagaaaccgctataagcccaggtctataagatagatgatgggtccattcacatgccataatattatgactatgaggaccattcgatgttatcaagcctattgatgtagcaaatttgtttgaacggggatcaccccaaggtaaatccataagatgtaattacaaagcagatttaataaatcataatcagcatcggatttattgtttatctattattaaaccccttggagctgctaatgacggcggggaaacattaattctaatcatattggacacataaaaaggtaaatgttaaatcaaaaatatttctatgacattgttaggtgttaggtcattaagataaattattatcaataaactacaatctcgataaaatatgttaagtgtctaaccacacatctgttaactttcatagttttataattctgggtatagggttgtattcaatcctgaatcatatccccacggatgtatccaatagatatgacatataaattatcaatcggatcgattttctacataattcctgtagttagtatctaaaacaaagattggatgaactttgaaggagataataaattaagaaattaaaactaaaccattataaaagaaaatgagcgtttagtaatatatgtcagcaacagaatcgttaagaagggatcatgctttaattgaaaaaatgataaatgctttaaaaaccgtttctctattgttaaacaatggaaaacaaatacctgaatcaattttaaaacaagcaattgatttcgcaatcaattttacaaatacttgtcatcatggaaagtaggaagaatcactgtttccaaccttggaaaaaaaaggtatgcctagacaaggaggtcccatagcaaggatgatatatgaacacgagataactaaagaacttgcaaactccattgttaattcaactaaaatctatatcgctacaggaaaacataatgaacttgtaaaaaacattgatgattatgttcaatatgtttcccttcatcaatcaaaggaaaaccaaaaactttttgttatggctgatatgttacttaatgaacaagaaaacctagtaaatgataatttaaccaagctggagaaagaaaaattagataaaataggaaactcccgggaatactatgaaaaattaatagataacatcaatttagatgagtgataactcttgttatttagattctattaaagtatgctagaaatacaaatttggtattcggacccctttatctactaaactcaaaccctctttgggcccgcttctttgtttttataattaattgtaaaaaattggttggaatttgcatgcttattaatataaattcataacaggagctttagatccccttgtcgcccgatatttgataattgggtatagaaacaaactccctgtttttgcaacaaggctacgaacctcactcctatttaacatcagaaagaaatgaattctagaaaataatttcactttttgtcaagactatctcatagtatcataaggcaataatttagagacacgatttaatttaatgctcttctattcacctaggtaaactaaacataagagtaaatccaatactgtcgttatcattaaaaattataaacccagattctacaccataagccacaagtcattttctagaattaaatgatcccagaccagttccaaaattagcgatatttcttaagaattaacgacatagacaatattgatgaaatgtttatgggaatgataatatcctattcgatatggatctgaacaaggcagttggacaatcaacctgattagatgtcaaacccactaattaaaatatagtttcaattgggtattggatgaatttgaaaaataataaagttgtttataagtgaaagtcaatacatcaaaaagtctcactattttcattgagcctgttaaaaagccgcagagtggatggagaagcaaatcattcaactagtattatttattcagatttctcttttattcccactgaaccatcataattgggcataaacttatcaatgttaggcatcttattgtattcttcctttattctaatagcattagatagaaaattatctttaatgaggtctaactgatttatcatcgatttttttgattcctcatttagggttaaaaaatttgattcaaccttttcaatattgcttactatttcgttatttccaaacatgttagaatagtttttcattatagatgcatttgtttctatcatctgtttctgttgaagatatgcattttcaatcatatttttgaattgagcataatttaactcgatcatctgtttctgttgaagatatgcattttcaatcatatttttgaacttctcattgttagtcattatatattctggttttatttttaaaaataattatataaatattgttatttcttaaattactaatcaatttatttttaataaactataaaaaattgatataattgtttaaccaatgataagaaatacactgaaattcttttactaattttattgttatgaaaatattccaatcaataattggggtttacgtttattccgtttttaattctagatctattaagctgataatgcatttgatcgtactacaattactcttcttgagtgaccttccggttgtttcacatattttggagtcaagtatcattttcatctactttttgatttaaatccttaaacttaacctactcaatcatttgttttggcttttgtaaatagtgtattctaaatgaaacctgaatatagtaaccataaataataatattaggagaagagaaatccccatcattgtgagtaatataatatcattaatactgggtttcgattacacgctggtggctagcttgaaaagagatagcaaagttgccatagttgctgcaattttgaatagtagtggtaatcactagttaccaataaatgtacagatggaaactagtaccaggaagaaggaatggcattatacttcttgctccttcattgtattacatatacttgcaaggatgcctgatcttccgatcgtgctagtttctgttgttgcacttttcgttttaatatattattaaattgtctttttagccgtgcattctttggttttagtcttaatctatgtccacagcatggacagtaattgtcaagatcccatgttaagaataattcgcatgttccacatcttttttgaccgatagcataccttgtatgggtggaatcaccgttaatggctatatatttctgacattctcttctacaagccattgggtagaatgttctttgacaaggtagataaggatatggttcaattaatggtttattttagatgttaatttgaatctaacaaaaatagttttaggtgtcaaggataaatatgactaaagaagataaattacccttatgattcgcagaaatgacataaatagttcagaactagtataaaacagacatacttacaattcaatttagttttatctatagcaaatttgcatacttgtgtggtctgtcccctacttgtgtaaatcaaaaagtaaaccttttctatccaaataatgaacttgcttcgtttcatgatgacaaatttgatgcaaataaacttggattttatttaggcatgggtttgattacgactactaactttggtcagcaaattgtattgtacggtggttcaaccgcgcatggttatgatgcccttttaacctttaaacccccgaagtggtagggttacaaattgcctggaaaataaaatcctttgaattacgatgagtcagtgaccatcaggttatagaattccaactggagaaaaaataagaacgttgtgtggatatcctgaaataagattaaagcccactaggaacagacaaaccaagatgctatttaggattgaacgttactatttgatgaagtcattagtttacccaaagtagtaatattatttattaattgatgacatctattcttgctacctattaaaatattacagaattataacaaaacaagtatatgataattcatgcgttaccattacaacaaaatgtcttttcttatctcataaatatactgaatctatgctagaaaaattttcttgaagacatgaaacccttttgaataattagtagacttagaaccaaattgaattcgtgtgggacgtgcggaactaaattaaattagttagatttgatgacagactttttcagtgtccaataaaaccgtatccttaatttgtctctatcatgaaagggactctccaaaaaaaacataatcagggcaaataattcctattcagtaactaatttagtgtggatccccatataatataatacttttataaaagcttgtaggctttggcgcaagccaataaaggtcttgagatagcgtaacagatctcaataccaagacccaatacctacaaatacaaattgtgtttacgttttcataatagccttttagttaacggtcaaattgtgtgtaaattacattcaattcatgatagagaaaaaagacgctatacaaacttggtcattttttggtataggtaacaatagataatacacccggaaatcacaaatcgatcactagggttatcactgtttttacactgatagaatctatcctgaataatatcacttatacgaagaaagtggtttgtgaattttggcttgaattttgtacccttttgataagacatatagagaaatcgattgggaagaaatagcatcataatgtgccaagcagaattcgacctgatatctacaaaaacataatggaaatatgatgtccttgaactaaacaaaatttagatataacattgaaaataagggttgtaaacttaaatatgtaaaatccaaggtatttaaaaggaggatagattcttatttattgaccagtaatttctttgaattgtttaaattctatcggtctagacaccaaatctttcattttagatctcagtgctactgattcttgactctgataatgtttgtcgtaagattctttgctatcccagacttcatcaaataatagttcatttggattttcaattgatgaattaaatgtatagattaagctaccttccctttttcttggcggatcaacaaggggaactagaaggtttaataactcttgtttctttccttcctttgcataaatcaatactagtactcttatctgagacctttcactgttagactgcatttgcataaaatatttcatattaagtattaaactttcctgaaaatttcgattagatatattaaaaatgcgctcatactgcactctgatgcatcttaacaaacactatgaattaagtcgactctcttggaagagaatgtcatgatcaaccggctaacatctaaatttgagcttctattatgcaactattaatcaaaaaccaaatacgaaaaaccatcgttggatgaaactaaccacataacttgaccatcaatatgttaccaatcattactttacagctatataatgataattctttaatttggtatttaaaaatttatctgttagtcaaaaaaattctcgattcgttttattgctcatattactaactttagtgacttatataaatagtaattattatccaaaagaatgaaatatctatttattgaattattgaattatctgaggttttttggactccatgagaggcttattcacaaaaccattcataatgttttttttatcttatttaataaattgaacagtcaattgtattatttatcaacagtttcctatgaaatacgtcaactttctattttaccttttctatcatttcagacattttgatttaatgagaagagaatgtcaataataaaattattaagttgtttactggatccacgaatcaaaaaaaatccacaaaatagttttgatctaggtacatctaatgtcaagtgttaatcttgtttgcccttacattcttctatatccacagtgtaaggttaggtgaatgatagtttcccaatgattaaatcaaaaatagaatatcaaaatgttttttaatttgttcaaagtatatttgtctaccattgccgaaacacttccattaaggtcttacgctatctcttgtgtaagaccttagtagaatttaattttattcaaacaaatgcccatacgagctttatagtcgacttctcacaggcgtgagatatcttatgaaatacatcaaaaattacctattgtgttaggaattttgttttatgtaaacaaattaatgcttaatgacaatgaggagagtaataccatattagatctcaatatgctagtgttaccctgaatttcctctggaaataaaattttacttaaaatactttcaaggtttttatacttttccccagtatgttattaacagctaccaatttgccatatttatttgaaggtttcctgtatccttagttaatgcaatcattaattgacttctttttaacatgaatctatttatttacataaatattatataatttggtctgactgtcgacattcattgtctaatgcaaagatcgaacaagtctaaaaatatggtagagatcattattattattgttgctaatcttgtgtagtcatcaacttctttttacgtcgacgattatttactatcatattatgattttcattatggatttcttgattctctaattctcctttcaatttaacatcattgctatttttttgtcttttttttaaaactttggtaatatcagtagatttttcgagatattgttgttcagaaacttccttcaaagtatcatttgaataaactggagaaggagaattcatcacatagtgtttatgccgcctttctacatctttattgtctcctttaaggaccttttcaatttcttttgccaaaatcctcttgacaagttctttgagtctatctgtatctggacccggtggataagtggctaataaatattcaaatattttcatgtactcaactactttgttgcgatagtcctcctcagagggtttgtgatttcttgttatcttaaaccaagtagttgcacattgagcaggataaacttttgcaagttcttctattacacgctccatttcaaagtaatctagcataaagacaaactcctatagaaaagaataattggaatactttcctttcttctcaatttacataatatgtgttcttgtactatttatcctctcattttgtgctcttaatataaattgccaatctaataggctttaaaggtaaagggtatcttatctcaaatagatgtgaatcaaatgtgatacagaaaaaaataatacgtgctgttttggtcctattcttgatccaagacaggatatatgaaaagaaaagacagttaattttgagatttatcaaaaacctggaaaagtataccatttattcatactaaaagaaatcaacgtcgattatgacacattaatgaagataattttggagttactaagagaaggacagttatggcctaagacagacttgatttagaataggtattttaaattagaacagtggaggatggtcgctaagaagaatttggcacatcgaaattaccgatattaggataaatctctttccaaaccgattgtatctaacaaaagctaattagcaaatgaattttgatttattactggtatatccaaaaagacttcctcaggtatttttgaagggctattggtacccaacacgcacttaaaattaaaattgtttgaagtttcaacacatgcattgaaattttcatttacatcaataacgccagaatcaaattcaaaagttaaatgtttttcttgtccgtccaatccaacaggttctggattgatctttgttatggcacattctccattcgatgagataatgaaaatagtaagaggacctacactatcgatattttgattagacaaattgacatcgatttttagacccttagggccatctcctccattaccattatcattctcattagttgaaatcacgtttaccgatacttcgggaaaactcaagcattgagtttgaagtggggattgggccgcagatccaaacgaattctgggcataagagggcagaaataaaaatgtaaagcaacaaatgatcaaagcaatagggtagttcttattcaaaaccatgttattctatctatcataaattatataatctttcatatttcattcggcagaagcggatcttaggtttcctaaaactgcttattaacaatcaattacatagtacatcagatatttcaaataccttaaatagtaaaataaacatcccaaaagaggtttgttataattatattgaggcaaaaaccaaattgccatattgtacatgcttaatttcgctttgatttttttttctgtgctttctcaaccatatttacacagttcatcaatgcagaaccttctattgaagaccccttaacgaaggtcgatctggtagtaagtggcctattatctccaactagtatggcttttgttgattctcaaaacatactagtattgtataaaaatattggagaggtaaaactggtctcgaatggtgagttaaaaaaagaccctattttgaaattggaagtagattccactacctttacctgttgtaaaggactacttggaatagacaatgattatcaaaatgctactaatagtagagacgtatttatttaccttactgcaacgggtaaggacaacatgccgattctaaataaggttatcaaatacatatgggatggaggggagctcataaaccctcaaattatattggaattgcctgccacgcctggaccgaatcatccaggtggcaaactagcactagatgctgagggtaatttatatactgtaattggagatctcaataatgaaggtatactacaaaatttaaaagatggtaaagaactatcagacagctccgtcatattaaaagtcaataggattgatggttcacctctacttgataatccttttgtaagtactaaaaatgaatttccctcaagtcaagtggaaaaatattatggttatggaatcagaaatagttttggtttggcagtagacccggtaactggaaatttatgggatacagaaaatggggataaagactatgacgaaataaatttggtatatccgggttttgatagcggctggaaaaagttaatgggacccatttctaatagcgatgttactgaaaacgacttggcggtactacgggctcgtattatggagatcctatttttagttgagaaccttccttaggagttaccgacttagaattttttaattccaagaatttgggagacaaatatgaaaacaacctttttgtaggcgatattaataatggcaacatatattatttcaaattaaacagtagtagaaagggctttgaatataaaagtcctgaaattgatgttgatcggatagcaaatgaggaagaaaaggatagtttagcatggggtaagggatttgatggaattactgatttagaaacgggcccggatggaaacttgtatgtattatcctttgataaatccagtaatggtgatggtaaaatatatagaatcacaagcaaaggataagatcccttcattatgtgaaagatcattatttcgcctgccctcacctcccctgataacactactctttccaaatctacttttccactttatattttagaattacgtcagaaattaggtacctgattcttataccaatgctttgcaacccaataccctatgtgacttattctaaatgatcattgtatctctttcatgaagttaatataatacgattttgtcataatagtccagttctaattcaaaaggaccaaaattgtaaatacagcacccttaagagacgatattagaaattcagtttaccgtacattcgaataactgtagagaattgtaaatatttctcaatataacaaattactaatgtaattatttaaggccgacatttcaaaaacactcgaagtcatgattgaaaccatatttcttaaagcccatcgcgtaatggaaattgcctatcttgtccagagatcaacataaggttgtaccgaggaggaccttcagaataatctaccggtacttgggggccttccctgttctccaatcaaatctacatttcagtaagacgaaaaacctaataataagatatgttttaagcactgtaaaatgggaagaatcaaaaggtatgattagtaatcttcctttcaaatacagatgggaggttagatcgcgggtttgaggtccggtccagtgtttaataactattgatcaattgttctccatagtctttctcatttcaaaacctctgaatgatctgaatgaccttgttcttaatttatggttacaacagagacagtaagttgcattccatcttttaaaaatcccacagacgctgcatcttttctgtccttacttataactagatgggacagaaggatttctttttgccttgaatcttttgaatgtttcattgcaactcatgattcaaacatcaaatttctattacggaaataaattcttttcctggttaatggaatcagatgtatgtataaaagagaaaacaaaatatgacgttactaatttctcttctttaaacattttgacggtcaacaatctggaagttccaaacaaaactactattagccaaacaaaaacaaaattattgaaatagatataatattgtacatttattggaaggagatatcatggatttcatggttcctcaaaaagtgatttgtcaaatattattgtaaattagcattataaaatacggtaaaaatattcataccatggtatcttataaagttgataaattctttatgataactaattattaagactgtatcttcaaaattatactcgaatcttattatagaattggattatagattctcagtatagaattataggttaaaaacctcaaataaatgattatactacgtagtcctaatcaaaatgaaagtaaatttttctacatataagatactcagaatggtcgtgattgcaggccttatcccggttagcgcaatccaaggtacctcattaataagtagtgtgtttgccaacaatctctgtttgggaccattagcctgcagcgctgtgggtggtagtggtggacatggtggaaacactggggacgccataagtggagatataggtcctggtggctcttgttttgcaaaaaatcatgtgactataggagatgagtgtggtggaagtacaggtagtagtgaacccagaagtggaagcggtgatcacagtatgaacggaggtagaggtggagaagcacataatactattcgtagctagatttagttcttgctacttcaagaatttcagtagtttttctataccagttaatcacaaatttaacttgttttaaacccattgtatggtttagagttctatcatctttataggaaatggaaaatgtttcttatacaattcgagcattgcgtagcacaatcaagtgactatttaacatctatacaaatcctaggattttgctaattcttattttcaaacttacccgttctaaatgatcttatcaaaagtcctaaagatgagttaattatgatacgtgtaggattaagaggatattctatccccctgttctgaatttatgttgaatcagaccgtgaaaatctaattttctaacaagaaaaatatctcatagtatatatcgtaatcatttgattttgagtattcatggtagtcccaactatattggctttgttacttgttgtatcaatacttacttttgttatgcacaatacaataataaagtaacaatagtctaagatgctccagaattatatgataaaacgtttgactcaatcccgcgatgataaaccagggcaatactgtgacttacaaataaacactctggaattcatactctaacagaggaccaggatttattaagctcaaaagatttgagaccagctcagacatttgataatacatttgactaaataggtacatttgtttatcattgcatgttacatccttttatgataggaaaaataattgtaaactgatataataggattattttagttcatattctcaaaaaactttaccaatttctcttgaaattttacttgtaattacctcatcaattcttgttgattaaaacagcaataagtattgatacaatcagtctatagtaccatcattggaaattaaagataacctattaaaatattgctgaagtgtgtctatacccaacaacattgtgaacaatgaatcaaaaaatttatctttagttaagccatcaaaatatattagtttttccataataaatttttctattttgtcttttgatgaattgctgtgacgagccaacaaacccaattggtataatgccatcaatagatctggaataaagcgattcttttctttcgatggtaatagagacaatgaatttttctgttgttttgagaaattcattgatgtaattaacgttaccttatcatgtaaatcatcaacaataatattgacattcctattattagattttgctacaagattcataataaccgtagggtcttcgatttcatcaaatctccaaatatcactttcttctacaagccatcgtttaattctcagcgatatttcgtgttgagataatgacatctaaattaatttaaaaacgcctctatataatcatataatagtaaaaataataaagagaattagattttatcgaatcctcaagcatagtgaaatagaagatcaaatttcatgataaggaagtcaactagcagtctaatcttgaatagacatgagtgataaagatcggcagttaatcatttacctaaaaattgagattaccatctgataattcttgatttttaggtttgatgaaatattcaatagaactaagcacaggatccaatttcaatcaaccagattaaggatttatccattgctagtctattagcctaaaatccgcttgtataattattgttcatgacctcggtccgcagaatctgtcattgctaggtgttttaccctttatagtaaatgtatcaggacagaacccctaaaatatccatagtcttattaatacaaaatttaaatttcacagactatacaccttagagccatcagcctttttcaagttcctaaacaaataagaaatgaaaaaaagataaacaaatttacattgaaaatagatgcgatttatggattaatatatagtaaccataatttctagggtattggtggacggcttctcccctcctcttcggttgcctcttcaaaaaacttagtacgaatatctctatctctatctctatctccataaacatccccaactttcaaataaattgaattactattattcgatacgttatttaatctgacaattatgtcaatatgaactggagaaatagttggtaataattaagttatgtcgtttagtatgtcatcattttcatagtacgtacaattttagggatttaaagtaaagtttctagaaccaattttacctaattctagaacttttggttcgaagtctatatcattattttcttgtaggcagtaccgattattttattactactgctatacttgtgaaacaattgtctatgcatatcataaaaacaatgattctatctccttaattgtttcaggattcttttcagtcaagacgtatttgatacctacgggtttattatcatcactaatgtcgataaatactacgtccccaagtgggatggtgctaactattttcttgtcagttattttaacatagagaatattatcctctggatcatactcaacgatcgaattcactagatttttcccccttctttattacttcttctgattaccaataattccaatttatggatatacttataattcatgaccaagtatttaggttctttctgcatgtgacaaatctacagaggacacagaatctgtagttagaactgtagaacctttgtgtgagtattagatttccctagaaaaaaatatatttcttgcttgatcactttactcttcatttttgagtatcctgataaattaaaatatgtatattctaaaaatttccctgaaaatcatgataaagaaattatccaacatttcgtattattacatttatggtcaagggactaacctctgaggatgaaaccgttatgctcagaaaaattgagggctggatactagacatattgttggaaacacataacgctggaccaaatcattgaattattgagagataactgattaaattagttacccacattccgatgatatagatactgtcgttgaagtcatgatccttcacgcactgatttattctcctgatgttgaaaaatttctacatatcagtgatgaaatcatagatcataacaagagaaagatagagggaaagttattttaggtactttagaagacctaccatggagaataagctattagaaagttaactgggaatatctgttgctattatacaatacacttaacttgaaatttagtattaacgataattagaactatcgaatcaatcaagcagagtgaggagactcaaaggtatttcataggtccaaaagatgtaaattcatgaaatatcatgataaaccaccggtgagggaatagggttggtaggggatcaatatctattaaccaatttttagtatcatctatttaaccctcccgtctagtgctatttaccgatctgcgtagcataaagaatgcattgtacatatctagaaatggggaaattgttctttgtatcccggtacgtttttgtcactaattacctcactactagttcaattatcatcagttaataaaggattctggcttttatcaccggtaaatcctgttttgtgcattcctctttcccagtccgttacatagaatcaaatttacgttgtacttcatgacaacttgtaacacttaccaaatagggatctcctaaaacgaaacgtccttattttattatcattcgctaaatagtgtatctctgtgaatcgtatacgctgtatatgacacatgtattgataaaagactatcaacaaaatttgcctttttaatttctaggcaaccagataaccccaaacggctctgttaacttaatgataaatctatagcttaaagatggtctatttccagtatgtccagtacaagaaataaaacatcttcatcatatattggtcgtgcattgtatttgtactttctaggtttgtcgacaagaaacgttgctaaagccatgttttgtttccgcaaggtcaagagaagtcatgttgcaatctggaagtggattcaaaagtatcatcctaaaaagatattatcaaagagaaaaaggatttcagaatttatcatcgacgagacattgcttaaagttggatttgaattcatctggttatgggtagcaatagagccagaaaataggcaaattctcgcactctttcttagctaataaatccaaggaaagaaacatgtttgttgctgagaggttcatctcagatgtaataaagaatcatcgaaaacatccagtttccacagatggtggcacatggtatccacaagcatgtgggttcctaaaactaaaacaccgcatccattcttcgtttgagaaaagtctaattgaaagaactatgcagtatatcaaagatcgaactgaaagttttgatgattactttccatgcaaaataaagaattgcaaactaaatcatgtacggaactggttgaatctgtttgtcaattaccataacgaggagaagattcatccttaagttaacagagcgccccaaactatctgtactattaaatatcagttcaaacatgattcatatacaatactgtatatttcgcagtcatcaagatgaaacaacctttggactggactctagtcatatttttcaagtattttctgactcacttttccaaacacaaataaagatacatcaaatacccatatatcaaataccaagaattttattgcaaggtccgataatttggaatctaaatagattatatgcaaataaagatatttgtgttttttgttgtttagataatttttttcatagataaaggtttgataaatttggaaaattcaggctctgaccaacagattgagtatgggttatatcatgaatacttctcgttagagtcatcataaaaactatattcaaaattattaccagtatcttttaaacaatcaattgaaagaatcttttgttcgtgattatgacaatgatgtttccaagtccatgatccaaatcattaccatcctgtgattatttggtaaggatttgaacagaaatttacactatttgaaataaggaataaaatagtacgatcttaagtatagcatcataatactaaaattagataaatattttgtttatccttttttaattgtgcgacccatatgatattactcgagtaggttagctgataaacccgtaaatgaagaaaatcttattgctgacttgtttgataattattactatttcttatttttgaacaaaacaaaattttaacaaatccaaaattttttccttaacaaattctgtagttatttcatctaatgtaaatgttccttcgcgacctgctgtaccttcctcttgcatcatcttttgcatataaagggttaccttatttggttcttccataaagaaggtcaaagatggatgcctgtcctgtgccgatgatatgtcatcgtagggatatatatctaatttcatctcagtcacgaatctaccttgaatcttgtctatgatatcacacctgatatcatgtaaaatgagcttattcttgatttccttaaaaacaggaaaaataactgtatgtactttttttgaaaattcttcggtaaattcatcgagattttctctggattcattttctgaagagtggtttcctctagttaaagtgatataattatcaataaccttgtcgatttcatcgtcaatattcatttttatctgatattctccttgcatatgagtaggaccatatataaatttgaagaaaattatcccaagtgcatataaaatcttgtcttctcaaagcatccttctgccagatagaaccattaatgataatcatccaatagaattatacatcaatttattttcatattaacaacatttgttgccccgttcatcttaattcatgcttatgttgattatggtgacaaagtacctcaactatcgaaagcatgaatggctcaagggatattgtctgcacatacaaaagcaaatttgatgaactggtgacccaaatgtttgttatctgaaagtcttacaattaatcatctttcataactaattagtcttttcctagagtattgtagtccgtttatcagttttcctttttatgaggtgaataacttgagtcaaaaatataaaaaccaactgagagaattcaaagttttccgtattaatggagggttataggaaaaagacttcaacccaacctcgaaatgcaaattcagtttaggattaatttagaacctgacttttcaatctccaatcaaatatatttctataccttcaattaatattcaaattggccgggcctgaaacaggccacaaagagtaatgtgatccgggaattattagtttctggactaaatgaaaggaaattgcttgttaatagcaatcaaacacctgtatttccccttctctcgggtaactccctagtcgcaattgcattgtgatacgaaatgctcttactaaaattcagacctttccttttatccaattccagctattatcagctttttttagcattagtttcaatatttttaattcaataataatgagagactaactctttttgttttcacatgactccattggattataagaaaatgatgaaaatactagtcaggccataagtacattttaatccaatatgctaatggcccgtcatcaatgctagttttttatcacccgaccttgtttgaaatattcactattaaggttattgagagaattacgccattgaaattaacctttgtctaaattttctgtcacgatcaaggtcaaagcagaccggagtttgtccaaattcttaatcttccaagcaataatttcctttagtgtttccatctcgcttgtagaaattctcacaataatgtcataaactccaaacactctataaacttcaactacttcaggaacttttcttattttctctattatttcattctccgatcccaattcgcagtttatgagtacataggctgagggcatatagtaatagaaccatacaaaaataaaaaacatttctgcatggtcaactgttaaattcattctaagatttgagcggaagtaggtagcatgttggtaaagatagaaggttaaattctcagtagagattaaaacagctgcgtgtcaaattgatgaacatgcaagctatgacaaggttttattcaatatgaggaaatcaaccttatattgtgaaatgttagaataattattgtttaacaagatcgtgcgaggtggattaggaactatggtaattctatatttgtactaatgattagtagttgtgactcatctaatgaagagtatttaactagattactgctcaataaattaatattaacttggaaaaaaattagatagaatttggtttcctttgttccccggttacccgactgaaattatcgtaaagttgttattaacaggtttattctaatcatcatgtcagctaaggcaagacctatatcagtataaacaggtaagacgatcgcataaacttttgggggggccctgtatctacactaattttttttgaccaccctttgatctatttgattcattccgagaattaagctagaaattccgtctgcaaataaagcaatacccaagagtaaccacaaataaacgtgcttcgactgaatatgtccgtgtaattaaagtaatgattgtaacactgattgtaaactgttgcttaaatatcgaaacatgtcagagaatactatgcctttggttatttttttcggttcctgcaaataactacaagatgtcaagaaagaacacattagatattgacctgtaagagaatttgtcggtatattgatttattaatataaaataataacccttcgtccaatttggaccatcctaacccaggtggtcgatttctcaagaatcaatataccacatgcaaaatctgccctaaataaatatcatgaaacatcaatgtgataacaacatttttttatttgaaacacatcttctccaagtgaaaggcatttcgtgcttatcaaattgtttaattatgcatgtcatattaaatcattaaggttagatcttgattctgtattgtgacaattacaatatctttttatatatcaagattatccttcaaaacattattaaccattttactgcaaaccaaaggtggatccgatgttttttttcaaaatccttacataataccccaacaattaaccagtgtctaaatattagtataaaatagagaataggtaaaccataaacaatatcttcctatctctgatatatgggtagtaaaaatgaacaagctatttttattcaaaagaataccttgccagattcacattattcctaacaggtcttgctttgaaaatttcaagcgtacaataatgcctagtaaaattatcaaactaatttgaagaacttttatgttcactgctgtctcacttataggaccgtctcatccagcagttggtaaaataggggtcattgttattgtccaaaccaatgagaatgacataggtctaataatacccactaaatcctatgttttacattagtttctaatgatagaaacgatccagtagaccagagtcaagtcaactatcagaaaaaggattgcagaatgggtaaaattgaaggtaacatgtatgggtgatagacccacagccagatctgtgctgatagtggcctcattcgatagtatggtaactagctttatgtgttcctaaatcaaaaattataataagaaggtgcatatcctcaaagtgcatatcctcaaagacttttaatatttctacgccatatgactgataggggctgatccaaaataaaagcaattaaaccgagatcagttcatctttgactcactcgaaacaaatcctatagtcttcaagaaattcttttataggacaataaacactaattgacgatgaaacaagctttcttatatactaagtcctttttggctcttgtagttggtttgggcgccattattactctgttatcatctggagtagctcaaggccaggatagtaatttatctcagaatgaaccattcaaatcaaccgataatacaacaagcggagggaatgagtccatgttcattagtattcctgttgaaaaaggatatgttaatggaaatttatcatattttataagtacagatgcatctgaagaaaggattgtttcctcagtaacaaatacgaccaaatttgacgttaattatgcaccgactctcagcaatacatcggaaattgctaggcaacagggttatgtatttacaaatggaatattagggaacggtacttttgagcatcaattaccagttgcatcagcaacttccggagatgaaggatatagtcccttatttgaaataaattatgtgaaatggaataacgaatctcaagcaagaatcttaaaatctaccgctgatataatagattcacagtcaaagggtgaaatctctatagaaaaatcaaacgtaatcataaatagtccggccgtgaagattaattaattacataattttttttaattttgaggtatagtttggaactttaacctatgggttaaaaaaatagatctatctattcaattcccgatcaaataatttttctgaatattgctctattattaggcgaacaaccagtagagaagtttaaggtttttcaaagacatattatcgtactatgattcaaactacaatcaagtttaggatcacgtaagagtaatgaggtttattagcctgaataatttccatatgatgatctgaaaattcatttaaaagtttaataggccttttgaatatcctaagaaaaagagaatcattgcggcctttgtatttttttgtggcactgctatcggtaatagcaattgcaaatctcgcaataattcttgcagattcagacagcagaataatttattctagttggatgttgattattaattcatcgatcgctgcgggattatccttgatagccctaataaaggataggtccaacataaaaaaagacaagacggcaatacatcttaccatagggcttgtattttggttcatagcaaatataatttggggatattatgaaatagcccttgatatagtatcccctgtaccatcattagctgatttattcttattgtctgcttatggttttttgatctacagattactagtgacttataaaaaacttggagaaataactaacaagaaaataatttaccttgtgtcttttgggacaggcttatttcttgtttatattctaaacttaatgcttagtctaacagaaatttccaattttaggggcttaatgctattcatagttactatagcttatccaattttgaactcgattcttacagttctagcgctaactatccttctcaatctcaaaaatgaaaaacatcatttcataccttggatatgcgagttagtcggcctattagccatagttattggagatagttggtttgctattatagtattgacggcttttgtagaacagatttggatatcagctatcttgctctctgctcactatttactgattgctggaggcctagtttggtttctgcgccactacagcacttgggatctgcatatatcagataaccctgtaactaaaaaaattacaaaaatattttcaattaaggctatctttttattcatcttaccggcagcctgtgttgttttgattattttatttttgccaatgaattttacatttttagcaaatcaagtaggagtttcatggatttatccaacatttcatgaacctatccaaacgaataggacctatgaagagtacatagttggagcaatcatcccacaatcaggttcattgtcttctataggaaaacctgttctttcttcacttaaacaggccgaaaacgacgttaatggttattttgaatcccacaattcatcatccagagtcaaattaatggtagcagactcaaaaactagtccagaagaatccctctcggcaattaagaagctatattcatctggagcgagagtgattgttggtcccgctacgagcacagccgtttctgcagtccttgatttcgcaaatgaaaaaaatattacactcctgagctatgctagcacctccccaaagctttcaatagccggagatagtctttttagattagtaccagacgataaaagccaaggtaaagttattgctgagaagatgagggatgatggtatcaaagttatcgttcctttctggagagcagatatttacggtaacgagttggccaacgccaccaaatattattttgaaaaattaggaggcatagcagaagaaggggtcaattacaaaccacataccggaaaatttgctactagcttacacaggatcaactttatcatgtggaatcaagaactcaaaaagatgaatactatggtatctgatgccataacaaaatacggtaaggaatccgttggtgtttatatcatttcttacgatgaaattacaccgatattgatccaagcccaattgtttgataatctcggtaagataaggtggtatggaagtgatagtgtcgccgagaaccaccatctcacgaaaaatatagactctgcgaacttcgctacacaaactggattcataaatccattattttcagttggcacaaataatcaaaaagcacatgactttgagagagaatctggtggaggtgaaggcggggaacatgatagctctatgacctatgcagccactgcatatgactcgttttggattgcctcaaaaagtttggaaaaaaattctactatggatatgggtagtggagatttgaacaagaaagactttgaaaagatattaatagaaactgccgagtcatacgatggtactactggtaaaatagatttaaacttggcaggggatagaataagcgaaaattatgatttttggcacgttgtcatagacaattcaactggtggattcaagtgggaggctgaatctaatgaattagatcctaaacactaatcagactattaaaattcaaaatgacttgataggtcaaataatgaaagaattaggtatttttggaataaagtccttgacactgtgttcttatatatttgaatcttgtatatatccagttatgatgtcaaatattatgaaatgcaaatgcggtactagagacattataaaagcaaaaaataatgaatcggtagaacatttcatgcttaataagaaatgcccgagatgtgggacggtaggtgcgtggagacaactatctcaggatgaatatatgtgggagaaagccaagagttagacgaatttagcaatagtcatcacatccctaattccaacattatcgaatttgttaattggaaaatccaattgatcccaaggaatatgtttgggattatgttaataggaaaagaacattggtttgcataattgttattttttatatgagtgattttttcgtatgtgatcctttagtttatccatatctgagaacttttctccacagtttgagcaatcataagactggttattagaatgatataaaagctgatgatgcattgcatcctcgatttttcgatatcttcttccacaggtatcacacctgtgcttcttaaacaatgacaaaaaatccataagttaccttaaagtttactatctaattatttaacaattattttccttataccacattagatatgtttcgttttaactgcattatttacatcatcaccagaaggccgtgctgaaatgatgatgtatttttattcgagagagcaatcaggttctgatagaattccatctttagtagtttcaaggatgataaatctgtcaataaattgagaaaattaatttatctaataatagagatttgttatgtctagttgatattactaaaagttaaatcattttttgtccaaagacaaaacgatttcctcaatggcctggctagagtttaacattccattcttcttggcatatgcttctagtaattttatttgtccgggagtaaaacatattggcatagaacgtctttcattattcatataattttaagataattgacctgatattaaaattttattgcatactggtcaagctgtttcaccaagataatcatcgttttcctgtaaaattagataacaatatttaccttttgaggatattaattattaaagcctcccccacttgaggttttccatacgtctcgtaattacgtttaggcatcgttataataatgctagtttgagggtaagattgaatcaaagtctgtggttgtgctcttaacatggcttccattattggttgtaactgctccttcatctccttatcagggattgctcggtttatggcttctagcatcatctgttgctgtgaaaccggctcaagttcgatatcctccactaatgtaagagtaacagaaacgccattatcactcaaatttttaattttataaacattctcacgaatttccatttaagatcagtaaatatcctttttatttaatcttaatcatgacctattatcaaactatttattaaataaaacaagagggtaatgaatttacaatgatttaatgaggaggtgcttgacaaaactctacaagtacgccattaagagatttaggatgaatgaatgtgattttgcgtccataggacccggttctcaattcccccaaaaatcgcataccattcgctttagcttgattaacatcattctctatctcatctgcagtaatcgctatgtggtgaattccttcccctctttcctttaagaatttactgatcgggctagtatcttctaaaggttcaatcaattctagtcgagtgtcttccaaattcaacattactacttttaccttctcatttgggacttcttctacatcaatattgtcaatttttaagatttttttgtaattctcgagagctctatctgcatcattcacagctatcgctatatgatccacacgcataataggatataaaaaaagtagtatatattataagcaataaattttattaattgatccaacagaaaagacttatcccttgataatgtgatttagaatctacagatcatggcttgcatccactcagaattatctactttattttgatgaatattactttcaagattccaaagcaaaaaatatacctgataaattgcattttactaatgataatgcgaattaaggaaaagtgactccaagtcattttcaatgaaatatccaaatggattgagcatagacaggttgttttctaaacaataacaaaggcaacaattattattttttcaaccatcatattgtagaaaccaatcgatttgaaagcaaaaatccaatctaaattctcttttgacagggttctaggttttcgctctattcaagacagtaaagtagtctgatagcgttaaaggtacgatgtaatatctattgttatttatggtagctaaaaaaattcaaattttgataaaggaaataagataaaggttattgccagtagccaattggcgtacaacaatgtaagttttgataaaaaacaaatttatctaataattaatagaaactaattatatgaacagaggagcgatccatttactggtatttacgctatttactttaattctattgactttgtctgtagcccaaactagtcactctacaggtaacgtctcaaagccttttatggcaaattcaacaattcttcccggatacattaactgtttgatatcgtatacaacgaatcagtgtagtgaatgtccacctaactgtattacatacaaggccagtaattttatcatagataataaggatttggcttccaatgtggacaaggtatttgaaaaatccttaagacaaatatcaattattaaatccgcagacataaataccaatcatacaaagacagcaattatttatttgcaaagtcttttgctaaaaaacaatattaaaccgtccgaactaactctaattaccgacatttttaatgatattaatcagacaaattcaactacaaccctaggaaaaacccttcatgataaaattaaagaattagaaatgaaaaaggattctagcccaatcgccatttccattgtaaatattacttcaaagggtgtcgatttattagtagactcagatagcattatacacagaattcaagaatatccggatcttccatacgacctcaatgagcaaaaggaatggattaacggtatcctctccagtactattgtaggatgtgagatctctggtgtgttgggttgcctaatggcatctataataacttcaggaatagtttaggcaggatcagttcataggtatgtagacaagggtattgaaacgtaaactattttttttggtctgatctttaatattactcttctttcctctggtttagttatcggatatttatctaggttcaagtatttttttgacagtttgttgaaatgatggtccgccccttcggttgtcttatcgaccacattccctataattgatgcagtttcatatgggtttgccatgctaaagatcgacaagcctatcctatcattgattattgtatttttttcctttgaccttcccaaggccgtgtttattaataaatcatgattctcatcataatcaatccaaattggagtgacttgaggataaccattaggcattatagtagcaagagatgcaaaattccttccatttaagagggctaatacttcattactaaacacaattttctgtattataataataatataacttttgcaattaagagattgtaaaccctatgctactttcagtaaagcttaaaaaatggcggatccgatgggtgtactcataataaataagatattttgggtttagaaaaaaacttaatatttctgatttacttaattaaaatataattggggattattgtaactctaatcctgatagtaatgatagggctcgtaattttgggaataggatggacaaattttttttctgctattctgaaaggtgctgacaaggtaacagaaatcccagtggttaaaaatataaccgatactgcccattttgagttgaaaaagattctgaagaatgtttcaaacgatgtggtacgtaatattggaaattagaatttccttgtaggttttcacattgaaatagaaaatatatgactattaagcctgtaaactaatgtatttttataataaatctaaaaaaattatttaatggctatgaccacatccacaacctgcatggccaccaccgctggtattctgttgttgttgctctacacaagtagggcatttagattgctgagtttctgacataaacgtagttccacatgaagaacatttcattttttgaattccttccataacataattcggttctcaaactaattaatagttatctatgaacaatcaggtttgggtataaaaaaaattatttctgtatttgggtggaatattgattatgggtatatctacgtctaaatccaaaaggcttaaacggctttccgtttccgtgatagaattttgagaaaaattccacatacagcaacctaactccctgaatgcccggttcaaatacacctaatatgatattgaacaaatgtcctactaccaggattatgattcctattatcaaccatattattccattatcagagaccctgatgaatacatgatctattacgtcagccaagatgatcgaagccatcattatgccgataagcctagtaaaagacaatatgtggcttattattgatggtaattccatcatggctctagttccttcgccataaaacattagcccaataccgccaaatatcagtgcaaaatacaccgctccttgtacactggcagtaggattgatgttttcatggcctattaacgctaaaccaattaacgcaacaccccatccaaacatcagccaaccgacttttccaattgcatgtctcttatttccgtgattaatgttatttatgataccaagaatgaatccaaaagagaccatacccaatccgatgtatccgcttaaaagcaataatttgcgtagtccccatgttgataaagcatcaaatatagtgccatcttctggcaagtgaaaaccgccaatactattaaggaaatcaaataaatattgattcaaatggaacccgaaataaaggttaaagcagaagcctagcacaattgctactatacacccaggagtaatagccttcgcaattttgaccatttgaacgggtttcaggattgtcaaaccgaatttcctaataggtttaggcataatagtaaagcctttatgtcctccctcaattcgccagattacccatcttgaaactaatagaatcacaattgcgtaacctacgtcagcaaacatcatcccgtaaaaaactggaaagacaagagcaaacacaagtgtaggatcaaattcattgcccgatggcagggagtaaaatcttatgaaggattcgtacacctttgtgcgctttgggttattctgcagagtaggcggaacttcatttgtttttaatacaaacattacggttcctttgctgtgcttctcaatcgtagccttcgtctcgtcaatcaaagattggggaatccaaccttctaaagtaaaagtgtcatgggtgacccctatattatcgattacttccagttttttattttcaatatctagttgttcctctaatccttttagcaaagaataattcgtttgagaaattgccaataattgattgtctattccttctaatttcttttcgagagcctcaagatcatgttttagattttctataacttcactaggtttaccttttaatgggggaacagcttccatgtgaacgttataaatattaataattgatgccaatgcatttgagggataatggggtaaaacaaccaaaacaaattcagtaattttttcaccctcttttgaatataatattatatcctggttattagattcaagttttttcttaaattcagaatatttttcactagcaatacgcccgaagaacgaacgggcagatttgagatgtaagacatctaaatcggctggaaaaaatgaaaattctcctattaatttgatattattttgtgcatttcttatctcagttagtatattttctttatctctttcaagtgtggctacatcattatcaatatcaagacgtaataacgcattttccatttcatttatggatggaaatctaatcttttcccctaaggatgtgggaggaagtgtactgagcaatcctcttattcgaattaattgatcaccaatatgtctgtgagattcactttccttctcaggcctcaagtaagccgatatttctttggaaatttgttcaatttgaataacactcatttcctgcaaaattgatacaacctgctgtctatattttttcaaacccaagacagctatctttgacatagcttctggtcttaataaagtcaaggcaaaggctccatattacttaattcctgatagtaaaatttccattatttctttcatcattgtttgatagtaatgaaaagaaatgttctttgccttggtttcggcctcagaaatagttttttgtgcttctgcgtttgctttcattctagccttttctatgctagattcaaccagcaatcttccttcattttcagcatttgcaatagtatcttccagatcggcttcaatagttttgatctgattttgcacctctactttacgctcgtctatttccttttggactttatcttcaatcagcttaatttgttctaatgatttaatatattgttcctgatcttgaatatttgacattttctagtttactccaattaaatatcggataataaataccaacaaaataactgttgcaataacatttccaatttttattgccctagtaattcgataaaattttctctgtttatcatttgaaaaacctctaaaatcattcccattcatatctttatacatttaactctggttcaacctctctcaattcttgcatctctctttcacccatctttctttttactgtttttaacattataaatgtgtcacgctctatttcttctaatctaaacgtaataaatttcacggcatccatcaatcttggaataaaaacgttctctatggcatttgatttccgttttgtcctctctatttcataaaggagtttccttaatgcagtttctttttctgcaacatccaagacaattttatgaactctattgaaggaactgattgcttcattaatggaagtaggtaattccaacaaatattcctcatataccctattttgaccaccttcaagtctaggaatatgaacacccattatacttttggatttcacatatagtttgcccatcataggtaacttcattgactcattttctaatctcatagacccagccaaaatttccgccatccttattgactcgtatcccttgatgagctcggtttgtaaattttctcgtaaagctgcagcagttttacttgtattaaaaaattccaatataagcgcttgacgttttaattttaacaatttaagcccctttcttgctattagaatcctacgttttgtgcgtatgtactctaatcttgtgggcctaatatctgcaatagagggcatttccttctattgctcctcttcttcttcttctagagttatggattttttcctatattttgcaataaactctggctttatacgcttcatttcagattctggaagatcagacaatagttcccaaccaatagagagggtttgctcaatggatctattttcatcgataccttgattaacgaactttctctcaaaattatttgcaattgccaggaattttctatctatctcacttaatgcctcttctcctacaattgcagagagggctcgagcatccttaccctgagcatatgccgcatacaactgatcggcaagatttctgtgatcttctcgagttcttccacttcctattccctggttcatcaacctggataagctggtaagaacatccactggaggttgtatatttaatctatgcagctctctgctcataactatttggccctccgtgatgtacccagtcaagtcagggatcggatgagtaatatcatcagcgggcatagccaaaatcggaatttgggtcactgaaccctttcttccttttatttttccggccctttcatagattgaagcaagatcggtatacatgtaccctgggtatccccttcgaccagggacttcttctctggccgcggatatttcccttaaagcttcgcaatagttagtcatatcagtcaagattacaagtacatgcatttcccgttcgtaggcaagaaattcagcggtagtcaaggccaatcgaggtgtgagaatacgctccatagatggatcagaggacaaattaaggaataatacactccttcccaatgcgccactttcctcaaattgctttacaaagaaattggactcctcacttgtgatacctattgcagcaaatacaacagagaaagattctgaagaaccaagaactttggcttgtctagctatttgagaggccaaaagattatgaggcaagccggcacctgagaaaattgggagcttttgacctcgtactagagtgttcataccgtcaatgttagacatgccggtttgaatgaattcagatggttcttctctagaataaggattaattcctgatcccacaagatcatatctttccttagatataatttttggaccattatctctagggttacccaacccatcaaaagtccttcctaacatttcatcagaaacagaaatcatagcagtttcccctgtaaatctagtagatgtattatcagttccaagtccataagtttggccaaatacttggacaactgcaagtccttcctttgtatctaacacttgtcccaaacgtctctctccgttggctaattttatctcaaccatttcaccataagcagcatctttgactccctcaacgaagatcaaaggtccagctatctttgaaaggttcttatatgctatcttagacatttaacgagaagcctccatcaacaattctttaaactggttcttcatatttatcttgatttcttctacttgttgttcaaccccgtcttccttggtccatttgatcatagacaagtcttttcgtgttccaatagaacttattttcgtggacgttacgcctttcttaatagcatctgcttctaattggccaaattccaatatggttgacaacatcaaaaactgcttttttatcgatgtatacgtgtcaacctcatcgtacgcactttgttgcagataatcttctctaatagaacgagctgtatctaaaatacctttttcaggttcagggagggcatcatatcctatcagttgaacgatttcctgcaactctgattctcgttgcaaaatacctagagcttctttcctcaaagtggtccattggggtgaaatattattcttgtaccattcatccatatcgtcggcgtataatgagtagcttgttaaccaatttatagatggaaagtgcctccttgacgccaaattagcgtctaatccccaaaacacacgtgtaactcttagagtattttgggatacaggttcagaaaaatctccacctggcggtgaaactgcaccaactaaggttaaagatcccactcttttttctggggaaataacaactgcctttccgcctctttcataaaattcagccagacgcctaccaaggtaagctggatatccctcctcgcctggcatttcctcaagtctacctgaaatctctctcaatgcttcagcccatctagatgtactgtctgccatcaaagcaacatcgtatcccatgtctcgataatattcccccatggttatcccagtgtagatactagcctcccgtgcagccaccggcatgttagaagtattagcaaccaaaattgttctttccattagaggcctctttgattttgggtcttcgagttcagggaaggtagtaagtatttcagtcatttcattccctctttctccgcaaccaatgtaaacaataacgctactgtcagcccatttggcaagttgctgttgtgtgaccgtttttccgctcccgaatggtcctggaatggcagctgtcccccccttagcaacagggaagaaagtatctaagacccgttgtcctgtaatcaatggtgattcgggtggcagctttctaaaaactggtctaggagttctaaccatccaccagctagacaatcccacatctgatttcccgtttggtgtttttatttcagccacattttcgttcacagtatatttaccctcacttatttcagataatttgccgttaattccaaaaggcaccattattttatgattaattaatggtgtttcttggacctcacctattatttctccctcttggacttcctcattcttgtttttccttgggatgaattcccatttaatgtgttgatctaacgcaggaattgtaacacctcttcctatgaaatctccactcttttcccttaaaatatctagagggcgttgaatcccgtcataaatagactttagtaatcctggtcctaattgcatggacaaagctcttttagtattgattactttttcgcctggcctaattcctgtagtatcttcataaacctggatagtcgccttatttccttccaaacgaataatctctcctaataatcctaaatctccaatgcgtacaacatgatacatctctgcatcttctacatcagtagccacaactactgaccctgaaatacgtgacacaattgaatttgacatatttccctactttcccttttattttcccgttttaatacttatcccaagcactcgttttgccagagccgcaatggattcctcatgaatagtgccctgcaacgcaggcataaaaataaccaatggatctatcgatgattcaatttttgatctcgtcagttgagaaagtgattcctgtacgaattggcttgctattattagattatatttgtgagaggcaaatagattttccattttttttgcggcttcatttttgtcattaactgtaaatgtatcttcaacacccaacaacctataccccataacgatttctctttctcctattactgcaatagctttaatattttcttttttcttgcttgacattttttattttactccaaaaccaataaagagttaatgcgttctggggtcaaattatatcgcttaccatatgcaatccttttgatattgtcccattcaaattcagcagttattataaagtaaaaaattgtgccaattgacaatgcaatattctttaattttcttacataatgtttgtttatgtatttatccattgcaacttcaaaatcaataaggttatgtgatttcaaataattatctaaaagatcatcaaattttatatgctcattaatcctgtttacaaaatcttcgacgctgtttgatgaaaagatttccaataatttttcaatcggaacttttccagcttcgatgagatgttttttgactatatctctatctaaattcgaatccttccccttaagtaaggtcaatatattcttcttatctatttgagtacgaaacagaatctcttgttaatccctcatcaccttggaaaaatttgatactttccagcaggtttatgtaataaaatgacaaaagttcagtcatcatagggctaatatcagatgtcttttggtatgtatctagattttgaatcaatatagtcccatacttgtactttactaattgattaacaacgccttctaccgttggctgagataatatgattttcatctcgtcatgtggaatattacctgcagtgattccagccggaaaattacgactggatactaagaatggttctgtttctgtgattgtgcgccctatgactttggatgatagaatgagttcaatgttatgtatatcccactttgagaaataggcccggatagcttgcttcccactaaaaggagtagattcaagcgcaatcttatttacttccactaaatgtcgattaattgcaacttccaacagttcgggtggggagtaaagagcagcggccctgtcaatttcaggtccataccatgttgattccagcatccttgcaacctctgcaacatcctctgcctttactagactctgaataaaatcaaatgataggaaattggttgaaattgcctgcaaccttccaaaagaagaggagtacggtgatgtagtcattttatcaaatcattttttcataaagaaagttcttaatttcgtcttcatgattttcaaatagctcttcaaaagtaagatctatttccctactctctgatttgtctacggctataaaccctcccatggtagatatgcttgatcctatagtaaccttcttctccttcaaataaggaacgtcagattccctacatcttatgataatgtcatcacctaggtatctttttgcatatagtaccatgtcctctaatgtttttttgtaatcggcctttttggtattattctttaactcctgttttatggaggccaatgcagtattcatagtcaaattaattgcatcaaatagaattttttttgcatccaatcgtgcactttcagtgattctcgcaaattctctcttagctttgttatcagattcactatcatatttttcttttatttctgttagtctttcgttttttatttgtgcaactctatcttttttttcatccaataaagaattaaggatagctaattctttcctttttctatcctgtatttcttcttcaaacgtattgagggcagacatttgatttatcttaacctatagtattcctagtaaaaggataataccaaggacgaaaccaatgatccatagagtttcagggattacgaagaagaataaaacctgaccaaatttttcaggtttttctgcaattatacccataccggctgcgccgattccttgttgggcatttccagttcctattaatcctcctgctatagctattgcagcagcgatagctactaaggatttatttaagccggcatctccagtcgtgttttcctgtgcaaaggcttgtggtgtcaagagcgtaaaagccaacaatgcagcgcctgcgattacaggtatcataaacaactttgaataacgagattgtttcattaataattaaagacctgcggtggcatattaataggtttttttaaaataatccaaaattctttgagttttattagattatgtaattatgcatacaaaatttctaaaatttgtgaatttaatggttctaatatttagatagaaatgagatcaaaatgtaaggaaaagtaaaattagactaaattgatctcatttgccagaaaataccaatattcttgttaaaatctttcagcgaagcaatttcctgacatgaatatcggctgaaattaaaatgccaatcccacgaggatatttgcactgtaggtcacaaatcaatagatttggaaaagtccttattgagattttcaggtattaaactgagttacgccaagacgtctctatttaacccagactcggtgaaaaataatcaatcttagtttgaaacaaattatcctcggcttttagagtcagacacaatattaatacataaattgatttatacaaaataatcttttattaaagaacttgactttatggtttatggaacgatcttgttaagaagtatcctagggctaatcatcctatcaattcttagacgtaatgaacatgacattgtgaatgtatatgatacgttctcaaatctgatgagcattgctactggagggaggctactaaattttggatattggacaaaagatataacaagccccctccaagcacagatactacttacaaaactatttggaatttacggatcttttgataccgctcaaacattattagatgtaggaagtggtttttccattccagccctacattggattcatagttatcctaacctcaaaatttattgcctaaacattagtttaagacaactaaaaagtgcaaattctgatataggcagaattcaacattcgaaagatgataagataaatctatcctcgactggaaatattgacactagaatatttcacattaattctacttcaacatcaatgccgatcagaaatgaaagtgtagacaggatcgctgcttttgaatcagcgcagcattttaagccgatcgccaaatttatacatgaatcaaaacgcatcctgaagaattcagggcagctcataatggccatgccggtcataaccaataaatcggatctaataccattttccaaaagttataacctcggaatacttgcagtaacttgggcctctgaacattatagtgttagcatggtggaatctttgttgcataaggataactttgaattatcaaatgtagagtatattggaggaaagatctacggacctttggccgacttttatatccaaaatcgtgatagattaaaatctgaaataaccaaggaataccccaaattactcgaaataattctatataaatccatgataaagatgaagatagagtctgatagaaatttcattaattatgttttaataaaggccacaaagagataaaggatttcagtaatattattgtaattaacaaattgacatttgattagagaaaaatcggattgaaaaaaacaaaattatctttctagaattgattaatagaagccagtagttggcaaatacccatgagataaaagtgctatataaagacaaggtaagccaagactaaattgaaatggcatcttgatatcacatttcgcccttagtagtcaatagcaataaccagacgcttatgttaaattcccagcaagaataactacaaataaacttggaagtaatatcaaatagaagttaattttggctcattcaagatctgattcatgtatctctgtttcacagttaaaaaaaaaatacggtgacaagaccgcgctcgatgggctatcttttgaggttaattacgggaaggtctttggattcctcggtccaaatggtgcgggtaaaagtacaactataaacatcctcacaactctactattaccatcatctggtaatgtagagatttttggcttggatgttaacaaatcttcctcaacaatcaggaagagaataggagtggtatctcaacagccaagctctgaggcaaacctaaccgtggaaagggctatggacctgtatggattaatgtggggaataggacgaacgaagaggaaagaaaaaattactgaaataataacttcatttgatctacaagaaattagaaatgttaaaaatgacgaattatcaattggccaaaaaagacgagtacaagttgctagagaattcattcatgaaatggatctattgtttctcgacgaacctacggttgggttggaccctacagctcgtcgagtgttactagattatataaagagccaagtgaaatcaggacttaccgtattttttaccactcacattatggaggaggcagaatatttgtgtgacgatatagctatcattaatagaggcaaaatagtcgcctttgatacccctttaggtctgaaaaaaaaatatggtaaagaaaacataatccaaatccagataaaagaaaagatttctgagataattttgaaactggcaggcactgtctcacccaattctcaaataattagagatggggaaaacagcttgaaaataacttcaatcgatccccaaaacactttaacaaaactaattgaaacctttactttaaaagggataaaaataattaatgtatcgatcagttcgccttcgttggaagatgtgtttttgacaatggtaaaataaagaggatgttattggctagaccttaatcctcaacatagaaactgcagcaacagagaaagcaattattgctagaatagtaattatgattacttcaaggagtacaaagtctgatacttgagcgtagactccggcacgggttatgtcgactatataggtcaacggattcatgtagaaagctgttttcaggggttcaggaatgccctctgccgggtaaaaggtcgtactagcaaaagcgaaaaaaaggaaaatgccgttgcttatcacattaaatccttcactactcttcaaccttgttgaaattatgactgtaaatgatccaaaaaagatcgcgcctataataatggcatacagggcatacggtatgctccataaagtagggtgagcactcccaagtacagtaggaagtccaattatcaagattaatactgcacttgtcaaccccattagcatgatcgttaccaaattactaaatatgtattggaccttggtaaatggcattaccaatatctgttgaaacataccattcctcttatcggtccaaataatacttccagctactgtactactattcattacattgaacccaatcataccgacagctaaaaatgacggataactaaccaatatttctcccactcgtatcccttgatttcccagcaacgcagaataagcatatccagatatgaaaatataaaaaattggaaatataatctgccagattaggaagactttatcaatagatgcgattaaatttctataggttaatacgagaatttcagtgatcatcatcaatagaccggggtgtttcatttataatcctaattcaaggttaaatccaaaccaggtagagtattgaaaaataatgataagtcattagtttaattcttttgaacatatattgatgattgctgatcgagatttttcatgttttctagccccaaaaaccataaaacatttgcaatacttaaaggtgaatataaggttaaaaaaataaatcatactcaatttattccccaaaggaataaattgaatttcgtcattgagagtaaaatcattatttaaataacctctaattttattttagactatgtctacatcgacacaaaatgaatcaccaaaagatattgcaatccctgaaaacaaagatgaacaaaaacagttaacaaatttaaaacaatctaaatttacagagttatcaagttggcttcaaagttgggggtataaggtcgtagacaaatctgataatgttaatatcgaagggatagaatttcaagcagagataacaccacaagttccatactcctccggattaagtacccctttttatttagaatttcaggacgacttaagcgatggattaatcttaagaacaacatttgaactcgacaagaacatagaaatacatttaaacacccaatccagggcaagagaaattgaactaacctatattgaaattagtcaaatgatactacctatgaaggtttctattataagggatcatccttttattaaattatacaaggtggtttttaccaatgggctagataaacaatattttctggattgcgtaactgatttgatgaattcgatgtcgttaataatcggcaagtgggatgaaaagtattacagtgttcctcctaaggaaacccaaaagaaaacccaaaagaaaaatggggaaaaaattgatgacttagaattagaggaaatcctgaatggctgaaatgtcaacaacctcaatctccgtgttatttagataattccaaatttggagttcatattttgttaaatagtccttccatttgaagctatccaacttatgattagttgaaaatggatagatgagtattttgaaaatcagggcaccactcatgtatttatttctccatggaacctaacaacaagttttaattattatgtggctatccgtggaagccaacgaatggtgttgggtgtcagttagaatttatttatagacctgattgcgttaaataacaagtttaataaataatggtacagagataattctaataagctgatttggaaaaatggatcattatgaaatattagggattgctagtaacgcttcatcaagagaaataacgtttgcttatagaaggttagctttgcaataccatccagatcgaaataaaactcctcttgcaaatgatatgatgttaaggattaacacttcatatagtatactttccgacccaaacaagagaagagaatatgatgcgtctagaaatagaactgaaattcaatacgcaaagaacgactccaaagataaaaaggatattttcaatgaatcaaatgctaaaaaaaatgaaaaagaaccatttaactcgtttggaagaaaatacatcaaatatgggcttattgcactattaaccctaaaatttatacttttagagctaagaaaattgatgcgacgaataatctgaagttaatgacacgatatcaaaagtttatgctttggccctagataggatagtcgagaagtgggtatattttgcatgaaggtctaattaaagctcaggttgactctcgctttagacggtcaacaatatagtttacaatctttatcagcgtttatcagaacccttacttattttcaaaccaatttattgacttgataagatattaacgcgtctacgatcatatctcatgtactcaccaacgatactagatctcgtgcataattagtccaaacatctttatgaaaagatgtgtgaaaatatcgcaatttctaaattattttaaaaagatacaagaagaaaaatcaaacgatatttgtattgcagatgaggttgaaaatgttgttgaccgtttatttacttataaatgtgagctggtatagatatattaaggaaaattaattgagaatgtgtctcaagtgacacaggttaatctttctcgaaatacaaaattttcctgctaccgataataaaattcaatccaataaccagattgtgactatactagataatatattaaccaagtaatataaaagataaaagataaaagataaaagggaatctgcattagttgcagggtttttataatattaaaaattaaatcgatgttttataattatttgaccaatatttaacacggctcataatgttgctggtttttattaaaaatcctaattatcttacaacattaattattagatcttacatagttagccaaacgactttgtatcctctatcttttagataagcctctgtcattcctttcgtcctttctttactatcgtaggtgtggaaggttatctacaaaaccattacttccttttcaaatcgttcactggtcttttaatcaaacagtttgatgacatctatcaaacgatggaatcaaaataccaaacattatgaacgtcttctgtctcggtgaaaagatagagaaagagaggaagaaaaaaagaggaggagcaggaggaagacagtataagccagacataaaaaactggtttgtcatgattttggtttactttaactatacgtaacctataccttgaccttgaccttgaccggatacctgtttgatttagaccagagtaacgtatgtagagacattcaaaagattgatggcttgataagacagtacccattcttcaaaaactatcagatgaccaaaagattgaacagaccagaggaagaagttgagcagtactttccaggctttatggcttttagactgtacagagcgagaaataccaagacccaaggacaggatgagaagaaaaatacactactcgggcaagaagaaaaaacatgaagtaaagaatctatacacaaagtaaacgaactcggtcttaatctacaaatcaaaacataagcaggtaggtaggtagggaagtaggtaggtaggtaggagacctgattacaaaatatacaagaagaatcatcctgttatgccaaaagatgttatcaatgcatttgatctaggaatcctgggctgggagtacaaaaagactatccaaaataaaagttcctctttaccgacaaaaaagaaagaaaagaatctaaaggatctaacggaagaggaaaaggaatacaacaaagatctctaaaataaggataatagttgaagatgccagctgcaggataaaaaagtacaggatgataaatgatgtgtttaggaatagattaagaaagtacgataagacataggacatagtatctggactgataaactatgggatgatgtattcgttaggctggttggatgatattggataggagacggaactagccatttctaattacgcaagagattgactatctcttagattgggataaaatatcaccttcagttttcgattagtaaactgtttttaagttacatagtggaaaaatatttttagaatttataaaatcaaagtgcgctcaattatttaatttgcttagtcgtaaatattacaaaatgttgtttattgagcaattaaaaagaggtttattgtttagatatagtgggtaaaatattagttgcaatatcctccaagtacatctgtatatggggttctatattccagattttctcactctcaaacaaatgcccgtaacgttgagaactccccatcaattcccttttccctaatttatctaagtagctactcttgacactagtctcgctgaatccattcttcctagcgagagaatccaagacattgtggatccctgagccatgttgagccgcctctttaatcctataagcaatttccttcggaatccccaatttttcagctagtctacgatgaactctttttccaaaattgtcatatgtatcagtacccccattttggatatttaatctcgggtcgattctcaatacagtatcaattagctggggatcaagaaacggttctcgcaattctacgctctgtgacatagttatcttatcttccctttcaagtgtttccttgtataataacttcacatccttaatcatatactctaatatcttgtcgtatccatatttttgtacaatcttagaataccatgaatagccaccaaaaatctcatcggcgccctgacctgtaagcatgacccttattccttgctcacgtgctagttttactgcagcataaattgggattgcaacctcaacttgacccatattatcatcttcaatcacatttatgatctcaggtatcattttttcaacgtcattttcggacaattgattaatctccaaatgaagatccagtttttctgctatatctatagaatttgtaatatcatttgaattcttaattccagatgtataacaaatgacatcaggaaccatttgttttgccaagtatgcaacgataacactatcaattccaccagaaaagacaatacctattcggctgaaatcccttacccgtttttcaacagattggattagagcgtcattgtaggcatccagagcagaatcaatatctttataggttattggatatttagtccgaattgacttactggtattgaccgttatagggtgcaaagatgtatcataagtatgctcgtttcctgttttagaaatagccaatgcatatcccggtaatagcctttctatcttgctaaacatattgatattccataaggctttcttttctgatccaaatgcgataaatcggtcattttcaccataataaatttgccttaccccgataccatctctcactaagatgatatttccagttgattgttctcgtatggctaaaacataaattccgtcaagttgaaaaacagtcctttttactgcctctaacaaattaccttttgttttctcataatgatcctctatcagatgtatgacaacttcactgtcagtagaggtggtaaatttatgacggccttcaagacttttcctcagttctctataattataaatctccccattgtgttccaaaaccagttttttgtcacagcttataaaaggctgtgaaccacatgacccaccaactattgctaatcgagagtgtccgagtacgttgtatgcattggcctgtgaaaaaaataatttatcaaatgtatttgagtatactatctcatcttcggtagccaatccaactccgtcaggtcctctatttttcatgcatgttaacattttttcaattaacggtgctacattctctcctttcttacttaatattcctacaatcccacacattttaaaaaattcctaaacaattactattgtataacaagatataataataacctcaatactcaaatttaagtattacactttatatactacatataatttagcacttcaataagatcagggttgtgaataatgtttttactttgtttgatgatatcttggtcttttggcataaaaacaatgcccaagccagcttgctttatcatgcatatatctcccctcgtgtccccgatggcaattgtatctctaatttgaacaccatactttgtagcataatgattcaagtgaaattgtttgcaaatggatatgttacacggacatccaattttctcccacccaagaggcatgacaatttcaccggtgataatcccgtctttaacaactaattcattggccgaacaaaaatccaaatcaagtttattcgcaacaacttgagccgcaatgctgtaactatcggttataatgcctgtcttatacccatttttcctaaaccatgtcacaattttatctgcgttgtgcattattgggatagaattaattgaatcaaccatctcactttctttgatacccttgagaagggaggctattaatcgggttttctgataccccaaaagggaggggtcagattgaattgaacttactttttcggttaacttaaattttctagaaattacttctattaatcttccttgaatcaaagtgccatccatgtcgaatgctacaagttttggtttcacagtcatagtcggtaatagataatataatgagaagggtattattatgtgctcacccataagttttgtggaataggtattattataagctaaattataattatgtatgaaacttgatttcccccctagattttctgagaggataggagctattagtctccacgcggtgcagaaaatttatgaattggattcaggaaagtctcccgagtttcacggtggacataggactatccgtgcctttgaccatgatgagctttccagcatctttagagacctcgcgattgtcattccaataaaaaatgaaagattaaggttaatagaaggggttttgagtggcattcctaatgaatgcatggttgttattgtatcgaatagtcagatttcccctgtaaatagattttcaatggaggttgaaatgatcaagcaatattctcaatttgcagataagaaaataataataattcatcaaggtgatccggatcttgcaaagatatttgaggaagtaaaatatacatcgattttagactcaaaaaaacagattcgcgatggaaaagctgaaggtatgatagtaggcattttaatggctaagatgcataataaaaagtatgtcggctttatagatagtgacaattattttccaggagcggtaaatgaatattgtaagatatatgccgtcggatttgggatggcatctaccccttacagcaatatcaggatttcgtggctatacaaaccaaaaataaggaataacatattgaaattccctaaatggggacgaacatcagaagtgactaataagtatttgaacgcattgttatcttatattaccggatttgaaactgatattataaagactggaaattcaggggagcatgccctatcgatgtcactagcagaaaatttgaattattcaagtggctactctattgaaccatatgaatttattaatatattagaaaaatttgggggattgcttcctacagattcacacgatatcgttgaaaaaggtgtagagatatttcagatagaaactaggaacccacattttcacgaagagaaaggtaaggatcatttgactgaaatgcttcaggcatcgctactatcaattagtaatagtaaagtttgtaatatggaactcgcaaaagaaataaaagaacatttactcagattagaaactttatataaaaaagataagagcggtaagacggatgcaaaaaaatatttcattatggatccgataaaaataattcctattgataaattcggggaattggtaaaaaagaatgtaaagacattccacaaaatttagaatagaaattttggatatcctattataaccttgctatactacgataatcataaattcaatgacggttcctctagtttaacatttttgttaaaaaacctaaagactaaccagtgtgtcaatagaatttagtgtcacttatccttctagtacgcaattttataagaaacattactcatatttcatatgactagatgagattagtaagccagttgttttaaaaaaaataaattccatcgaaaattgtagttatttttgaagatatcccctcgtgcgtgggtatgaggaaatgacaaaatgttatcatatgatacagattaatcatcaagttaaaatttggtttttaggccaagtagaaattcggatttgatcaatttccattagtgccacctgtttgcaggaggttagtatgacattcaaaatgattttagtttagcttgactgtctctaaacatacaagaatgaattttcctttcctcttcatttcgaaactaaaatggtcttaatgatgaagtaagatttgaatgaaagataaaggaaagattattttggtatcccgattatcgacttcaggagtaagaaagggtctgagaaatttacaatttgtcatagtgcctggaatagtaataggcataattggtggaattctacttttttttgccgcatataattattatcctcagaagaatgtgaatatcaatttaaacggcaaatgctatgaatttttggatgaggcttttcaaaagtaccaagatttagtatctaacagagaaagggaattgttaaagttgcagatagcgtccctagaggggtcaaattcatttgttcctattatattcagtggttcaagtgatgacgtagactatataatagacaaatttgacatcaaagtaacagaaatacagacattaggtgaccagaacacacaagtcgataagatgatcataaagggtgtaatcaacaatacgattcttgaacaaatattggataatatttctgataattttactgatactgctgcgaactcgatgcccaaaattggcatcttacccaatagcggaattacagtgtccgagagtgcaaaaattagcgataatatggatcaatttatgattaacgggctaaagaaaattatatctgagaaaaatggggtaaaggaaacagaatgcagaagtacaataatctataatgattgatgaattccaaaatgcaaattcctgcgtttattctttcaaccatgaataaaacccaactctctctaatacaatagagtatatgagattacaagatttgtcaatatttcggaaattaagacgcgggccattttactttttttatgtaaatgaaaatgctgtgtgttacaggtcaacatgtcagtgattggaaaagatccattagaatgccctcccttacttattcaagaaaatttgatgtaatgaatcttggatttattcagatatgcaaaaaaaagatctatgaatcattcatggttattaaaactacatgccaattggagtcctttattttaatagacttccaaaacatcaacttctgatcatccaaattatctttgagaaatacgggtctaggttcatttgcgaattcattaattagattaaaatgatcaaatgtctcaagttttacctgataggtcatattactaactgaactcaacgataatgtattatcaaggctactagaataatatggtccactctttgttttattggtatttaaaagttcagacccattatgatcgatcaggatgaaccgattttcattgtttagaggcagaccctccaacaaatctactaaagatttcaaatttattatcccgacccagtatccactcagagagcttgaaccggtttggatatttgaatcgctcttctgagagtaaactgggaccgcaactgctattgcaggagcatttatagaagcagacaagaaaattgaactcatgcaggtttgatcatttttgacaactcctttataccattctcgatcagcaaaattaattcttggaagctgctcttgatccctatatggttctcccatatagatatctccatttggtagcacaaagaaaatgcttgcaatatctttgtttcgttggaggatatctttagctagatttcttttgttcaagtctaaagtagaatgaataccgttatgatcactgctaacattctttataaatggcacattcttaagtgactcatctctgcttgaaatttcaagagtttcaacggtattagatattttgtcgtgtatcaaatcggcaaacaggataagcattgtaaacttatcagttaggtttactggtagtctttgaaaataatttgaaagttgggtgctgttatcaaattctagagcgttaataggattggccataaaagaggaaaggtagatggcagtgataaacgtcgtaatgataaaaaatatggtctaacgatgagagttagaagaggaatttgttgagtcatttgctacaatcagtgaggacaatgtcaaagttgatattatttgttatgttcgaattttaagaaattttaaaagattttgtaacctttcatgaaatgttgtgataatggcataatcaactgatttctcgatttgcaaagtaattcaaactatttacatatatgataaaactaaatctgcagcactttctttatgtatcaggatttgttcctaatgaaataaaacgtttaagcatacatgcaaaaggaagtaaaccaagaaaaaaattattgtggatttgactctaagtatgtagccgaatcgtcaagtagcttgttgatatcagcgatattttgctttatctcatctatggatgcattttcgtcgatctgttcacgaagcttctccctcagtaaagcctcgcccttatcggctagtgctttgccaattggtgcttctaaatactcaaagttatccaagtatgcagcggtggccaattctttggctttaattttatcattagactcatatgcagagacagtttcatttagcaatcctctgattttgtctatatagtcctgtgatgttggattgtagctggcattagcgcttgtagaattgttactagtatccaaatcattgtttatcctctcaattatttggttaacaatagattggtctctaaggttctggaaagagtctgtcaaatttgcaaaatcagacaacaacgtcgtaattgcatgagtatcatttgaaatgttttcagtgttattgaacaatgcactagccctatctacaaatgctgaaccatcctgatattccaattccaatgtaatattaccccctgtgactccctctttgtattcagaagcagcagtttttaatagatcttttataacgctaattttgtgctctgcagtatttagtacgactgctggtataacctttgtaaccacattattggacaagtctattgaagacttgcccttgtcctcaaattctgctaatgtagtaccattattggaagccaacccggccaattgattcaaatcattaaaataggtatcatttagattcctgtcggccatagataatggaatagttacaagtgacaatacttcttcgatgggatgaagagtatgagataaagttaattcagtatcattgtggaatttatttaactcggccttttcaatatggcctataatctgttcaatatttgaatgaaaactagtataatccgtctggttttgttgttcagtaccattgttctgacccattacctgatttggtaaggcggaaccaaatatcgcgatcgtaactactgcagtaattaatcctagtgttaatttattgcttttatatgtattcacaatgagaaccttccttataatatatttatatgattattcaattctcaaaaatgagaatgaagatgtgcttttgtttcttctataattaatcatacaaatatcgtgcccttaactatgttttatcattagttttctttttcagctcctgtagaagtagaggaaatttgtgattgtgctaacgagaatcagctctggaatgcaaaaccaggaagattaattactctgagtcttcaaggcccaaccctttttctttctttctagattttagcacttctaaatattttatcataaagcatgtaaggtataatgaaaggtcgaattatatccatataatattttgaagattttccatatacaataatatccaaatgtcaaacctttttagaattatgattctattgtacttggatttgtctggagaaaaaataacaactattgagaacgtgctggtacttcaaggtggtggatcacttggtgcttttggatgtggagtgtacaaagcattagtaaaacatcatcttgatttggatttgattgcggggacttcaattggtgggattaatgcggccattatagcaggtagtcgaaataaagataggacagatcaaatattagaagaattctggatcgaactttctgaaagttttgttcataaagataaattttttggtttttcaagttcaaacctaatgaagcagttttataaaaattttgtctatccacttcataagaatgacacgatcgcaagttatgtagaaatgaagaaggatcaacagattaaaatcaaacaacttgaatctttctacagctctgcagcgttcggaaatgaaaaatttttcaaacctaggtggtttccggaatatgcgatttcagacccagagtactttacaccaatgaaatggacctatctctatgatcatcaaccactgatcaagactttggaacgatatattgattatgataagttaagaccgggagaaaatagcaatcctcgtctaatactgaccgctgttagtattctcgattccaaagcattaatatttgatagtttcaagcaacaaatagagcccaagcatatcttggctacctctgcttatccactttacaatttcccatggatagaagttgacaaaggtgtttttgcctgggatggcggccttttgagtaacactccacttagagaagtgcttgacgcatcgccgatcatggataagaagatatttctagtagaaaattatccaaaggaggttgactcgttgcctggtaatatagccgaagtgcatcacagggccagagacattatgttttcagacaaaactgaacacaatatcaaaatgtccggggtaattacgcgttatttggactttattgaagaactttatcaaatctttgaaaataatgcagacaaattacaattagacaagaatactttaaacaaaattcgtcgtaaatataagaaataccatgaggatcatggggcggaaattaaagaaatctattatttttcacgcgatgaaatgtaccctcatatctttgaaaatgccgatttctctcctgataccatcaaggaattaataagagcaggagaggacacagcaaataaggtcatacaagatcataggcagaagtaaatacttaaagtgctgtatggtttaaaaaggatatttggttcactcaaaagtatcggtagactaatagtaataaatatcataaaagaataattaaaggaccaaatttgacggtcaacacataggctcatcgtcccaagataaagtcatctaccctcgtcttgctctactcctgatcatcctaaacaaaatccaatcatcggatgtttgaaataattaagtcgtcctgattggtatccagaaccattccaaacccaaaagttttttgtaataaagattttagttgttgatgggatatctaaggcgagcatgatccaccattggggataaccctataatcattgatttcattggatttatctagcacatgaatggaaaaagtaatcatcaattacaggccttttattttacttgtatcgaattacacctgtcaacaaagtatcataatgacactgatctatcaaagcatttgatagcttcctcgaattcattcatctgatataaagaatttcctttcatataccatgaattatagcttttcaatgaagatagagccagagatctatcaaagcatttgatagctacctcatatgatttccttttgtataatgataatcccattatataccagtgatctgctaaaccacatccttctgacataatcaatattacattcaaactagtcttttataaagcttttgatgaatattgattaatacttgcttttattgcatgagaatcgcaaaacctctttgattgtttaaaagtgtattccgatataaaagaattagatttatttaataaacagaaataccggtgcaaaaaatagccatattaggactatatcattgctgtgctaattaagggtgaattaatgtttacaattgtaaataacaggacgagtgattttatcactttccatttttgttaaccattgtaatacaatctgaaaaatcttctttgtatatttcgctttgaaatcaaaaatcctaaaagtcttgaattctcattcccaaacatatttcgcttatcgccagccaatttttcgaaaaaaataggttttggcatactcgcgacttcccaataaatatcagaatatcagacaccggcccatggttttgtatttcgtgaatgtgctaacaagagtcgcaggtcttttttagcaaactatgtcataagcatcagtaactattctttgatagattgaattgttcagatctatccggtaataatctaatttatcaggatcatacttttgtacaatttcaataatttcgcttttcttttttcgttgaaatattacatccctgtgagcataaccagtgacataactgtacttattcttgatggcttcgcctaaaaactttatccttaagtaatgaccaccggttcccccccaataaccttcaaggatgctgaccccttcaagataaacggtattcattgaccccttattcacatcgacagtacctgggcgcaattcataattttccaatggaccgccttttgcataacctattatatcaccattcctgttgttcatccttagtgttaccaagatagaagattcatctgcgattgtttttctgaaatattcttcactttgcctcatcaatgtggaaacccgactgttaatatctaaaaggattttcatagtatcctcattcactttgccattttggccttcggtaacaaatatcaatcttgtacctcttttggaatcttttaatcctaattctttattccatgattccttaaagtacgctacgttatcatagaaatttttcctaaattcagtaggtatatttgacataatataatcaaacatctccttttcttctaccataaggttatcaaaaaatttcacagagttcttattaatcacagaaggatgccatcccaacgcatgagcattacgtcttgcgatatctcttgcatgttcataattccccaacgcgtatccggctattcgctcagacactgaaagaaaccatcctaaacttcgaaaacgctcccttgttttaatatcgtgttggaaaattccagcttcatcaaataattcatcaatcttcctagtcgcatattgctcaatctcccctttgaacggataagcagttctatgaatcagtatcatgactaaatcgatattcagatttgcactagcaataaattctttaattttaggatcgtttctaatgaaaaattcgacagaatcctcattgggtttatcaaattccttaagaggatcatagtcatgaaacagcgcagctacaaataaataagtagtttcttcttgagatattttgaaattttccattttgttaatcccagaaatcgataaaagcgtgaagtaaacagcttctagttcgtgttgaatattatgataaccataataatcagtgcccaaacctttctttgaaaattcagatattgtgtgacgtagtatatcttttatccatctatcctcaaagcccaacgttttgcccaagtctataatattatcattgaggcttgattcggcggtttgtcctttgtgaaattgtagccaccaaggaaataattttatcctattatagaattcaaatccaaatagggttagccgcccgggcaacttatctgtcgacaatccattcttattgtttagatcatccttttcactatcagatgtaaatatcgatgatctacccacatctctagaattagaaatccatgatataaaatttgcttttatacatgatgatttttgcaattaatcaaataaatgatggtttttagctcaaagtatgaaatatttaattcgagagtgcaaaatttaatatcaacaatactactcccaaggaatttcccactaaaaaaaaatgagtcagggtagtgtatcgacggaacgggaactttgacattcaaattgaggagtagcttttacataagctttctttccccgctgatctataaagcatagcaaatttatctgagaagatgttttattccaaaaaaaagaacgtaagtttcaggcatgcgaggtaatcaaatttggaataagtcacctgaataatacctcttgatatcctacggttgttttgaatataaaattgtcacctcaatcaataggtcacacgaaaaacagctcaggtatttggccatctccaatagcagtaaaggttgtagataatcaatactattaaggagaaatcttggcttcattgatcaataataacaaaataatttaggtattggtattaaatgttgcaataagccacataattccaaactgatccactactttagccaatttatccaatgcgtactcgtatgttggggcttgaattgatttgcaacctgctttcaatgctttatcgtaagtagcatcgacatctctaacgtagacccacaatgaaagtgaacaagagtgactaattttataatcttcctccatcataatacaagtatcaccgattttaatttcagcgtacaaacctttttcttctttaaatcgtttgataacaactgcatcaaagactaattctgaaaatttaatgaattctaatacatttccaattaccaaatatggatttaccgtatggtaaccctggggaaatgagtccgattctatcatggagttgtcattaattgaccaattatttttacctatcgattggaactgtattaatgataaatccagtataccaattttcataactctaataaccagattgtagtaattcattactttttctcgtagaataataatgttgttgtatggtaaaaagtggaaaaatcgtcacgtttattagcattttttacaacatttcggtatagactaaatatatagaaattaaaatgataaaggcctaatacgagctccttcttagcacgactattgaacctgaggtggactaatccaatacctgaactgcttggcaacactcaactaccgattgccatgggaatatcgataatagtattagtaatcattgctttgttaatgacgcgccaattattggattatacccacatatccggtaatatcatgatgattatgactatcgtcatttcttatgggattggttcttttgttctcctgagctttgctcatagggtaagcagagaattgagaagtaaatcacttttaagcaacctaatgcactggacagtaattattgtacaattcggaattttgattacattgttaatcatgttattttttggaaatccagaatacattttatcaaagtcaatattcgcagtgagttcattgcttgccacggtgatcatgttagttatagcttttaaatttttttcatggtatagggccagcaagtataaaagtcccatagtcctgttctatgcccttgctgcattgactctagcttgttctatttttgaagacgcgagtacaaaattgctaatggtccaaatcatatatgaagagcctgtgcctgaaaatcaagtcataggatcatcatttcaatataaaggatctgagaaatatgatggacaagttgtatttgtcgatacgaaaacagatgaaacggcgctcttcataatcccagagtcatatctagaattgtataactatctcaactctataattctgccaattggatttattttcagatggatagcctctacaatgctattgcggagtgtttataagaaaattggcccatttccaatatatctttggattataatgtctctaccacttgtactctatttaattggtaagatgcctggcttcttttcaggtgaaagtctagctgggattgacgaagcatatagatactattttagagtactatttagagtaggaacgatagctggaaatatcttatttggtctagcgttcttcatcgttgcgaagaaattgaaatcatcaaaagttagagattatcttatcttagcgggtcttggtaatacaatagttgggattgctctttctacttcagcgatagaaccaaccttcggtgttgctgcacattcattagttcttctttctacttatctatttacacttggcctttattcttccgctatcacaatttcacaggaaatgaagttacgacaatcaataagagactctgccattgaagagtcaaaacttctagttagcataggttctgcacagatggtacaagaaatagaaaaaaaggtctttgcagtagtcgaaaaggaaaaagcagaattgactaatcgcactggattacagccatcattcacggaagtagacacaagagagtatctggatacggtacttaaagagattaaaataattcaaaatattgacgatattattttaaagagcaaaagtatcctatctgactctatggagtttattctgtgtactagaccttctggattaagattagcatacaataactattttgaaatttatcagcaaatttgcagaagtggaagaatccacgggcacaacggaattaagattataacatctattacagatagtaacgatatcgaggtagtaaacaagtttttggcattaggaataaatatcaagcatgtaaaaaatctaccaccaatcaactttgccgcttcagaaaaagaaatgatagcaacgatacaaaaaacagaaggcgggcaaatccttcaaaacctacttacaaccaatgagccagcgtatatcgagcattttaattcaatctttgatgaattatgggaaaatggaattgacatgaaaaataggattaatgatatcgaggctggagtagataatgaagggatagaaataattcaaaatcctgaaacattcgagaatttattctacagcctcatcgtatctgcgaaggaagatattgttggaattttttcaactccgaatgcatttagacgtcaaaagtatgctgggacatttgatataataagggaaagactggaaactaaatccttaaatataagaattttggtcccggaggacaagttgatttatcagactatagacgagttcgaagatcaaggtatttcagacagaattaaaattagactaatggagccaagcatgcaaaccaaagtatcaatagtagtgattgataagaaatactcactggcagtggaactaaaagatgattctaagaataccgtatctgaggccattggattagtaacgtattctaatagtaaatcaacggtattatcctattattcgatttttgaaagtttatggaaacaaacagaattatacaaacagttaaaattaaacgagagaatgcataaggaatttattaatacagctgcacatgaactaaggacaccaattcagccaatccttggggcggtagatatacttagaaataacgcacatagttccagggaaaaggagcttgttgaaatcgtcagtcgtaattccagaaggttgaaaaaacttgctgaggatatacttgatgtcaccaaaatggagggatattccttaaacttatatctggaaaaattcagaattagagatattatactagagaatattcacaattatgaaacaaattttgaaaaaagtaagattgaaattaaatataatgaagtagacgacgtacaaatttttgcagacaaaggtggcattagccgagttgtctccaatttgattaacaattcaataaaatttttgcccagcccaggaggcttgatcactattacggttaaactaacgaaactccaaaatgatgacaaatccgattccatggtggaagtaagcataatggacaacgggacgggaatagatagtgagatactaccaaagctatttacaaagtttgcgactaaatcttttcacggcatcggccttgggttgtttatttcaaagagcattatagaggcacatggtggtaggatatgggccgagaacaacctggtgggacaaggagcaacattttcatttgtattaccccttaagaattctgaacagggtaacaacaaataatcgtagttgggctattatgatgaccagaagaaaaatattgatagtcgatgatgaatatgatatcacttttgtctttaagataatacttgaagaaagaggatttgaagcagatatttacaatgatccaatcgttgcgttatcaatgtacaagacatgctattatgacttagtaatgatcgatctaaagttacctggaatgacggggtttgagttatataatcaaatcaggatgtttgacaaaaaaaccaaagtatgctttttgacttctagtgaacagtttcatcaacaatatcgcagcaatgaatttcaagattttgacccagaacttttcattcaaaagccagttgagaatgaagtattgatcagtagaatcaacaaaattatcgaaatgtgatctactgatagtttatccactcgagttctttgattaagtcgaaaattttttgactttaatgaggtgaataggacaagatttcaaattccgatatgttacaaatctatattgttaatacacccatctaaacaaacaatggtcaaagaatgtcaactattacagacttgattaatccgtaatccggttctaactaaatctatatacaataacaaattccatcctactagtcataattttagtgtgaaattcaattagataaagcatattgattttatctagatgacaatcacttttcccaccatgcccggatgtaagatacaaaaatatggatattcacctgctaattcaaatgtgtattcataagtcttaccagtgcttgctaatgctgttggacctgccaaccctgaatcgaaaatacgatctgggttggtatctcccacttcccctgaagtaacagtatgaaatgaaaaatcgtcatttatccatatgacagtctgcccaacgttcacctctataggatttggattataagcagtgtcggttagaaatgtcgctccaggtacaatggatacctgaattttatcagatgttgggatcgtgtcatttctgggcattggagcaataacatcaccaactttttgagcatttacgtgttgaatatatattccattaggaactaaagctgcaaccaaagttaaaccagtcactaaaaaaagtgggttgattttcattagggatatgaataaattgatccttaatatttcatgttaaatcaaggttcagccaaaagtattatgataacattcaattatcatgctcagattcttttccctgagatctctgggcaattgaggcgtttgccctcattattttttttagaaaattaagcatgtcttgaaggtttatagggttgagaccgatttcaaaccagtctcaacccataattattattcagatatttaaataaacttttatttccgtactttgagcatccaactgatattagaagaaaatgaatttgaatcaccagaccaagatatggttaattttgatttcactatgggtaattaatggttccagcttccttgctattaaagtggctatcgatacgattccacctcttttgagtgccggtttacggtttattatagccggtgcgatattgttcacagtttattttcttcaagtcaatagatatagattgtgggaacatcacgaccccgagcattcacaagagatgcctgaagcgggacaaaagattcgagcactagtacaggtacctagggaacgaatttcactccagcaatggaaggacagtctcattctaggtgttactctattcttggggggacaagggttgttaacttggggagcccaatacttaacctcagggatgacaggattgttaaactctaccattcctttatgggtagcgattataggctatctgatctatagatggtttaagaaagatactatcggtaagaaaatgtcaagaggaactatcctagggttggtcgctggttttggtggattgatgctcctggttggcccttctattggttcaggagacctaaatccaattggaactgtagcgctaataattagttcgatttcatgggctatcgggtcaatctattcaaccagagctcaactcccagttagtatattggcttctgcaagcatgataatgattactggaggcttgatgcttacgggtgtgagtttcatatttggcgagtatagggatttggatttgatgcaggtttctattcagtctgtagtagcccaaatatacttgataggaataattacggttgtagggtttaccgatttttactggcttctaagggtgacctccgcctctcttgctaatacatttgcctactttagtccagtgatagcagtgcttctaggggtggcagttttgcatgagactttaactctgattactgtaatagcgatggttataatcctcgcaggagtcgcattgatggtgacaaaaaagaaagctccgagcaaatcaaaacagatgcagtctagttgattaatagtcaaaactgctctgttttgaaagtacatccctgtggtgtaatatggacgaaccacagtatgaaccagattttatactctatgtttaagtaattttatcctgcctcttgtatttccgttgggttcgatgacatccggtctggacaaatcaatgcctttatcgttcatctctccagcgaaatttgcttacaggtatgccttaatccgatattttaaataaaaaagctagccaatttcgtgattttgcataaactctatatacaatgttgtttgggtcctcagtattaaagacaagttaaaccagcaataaattccagatttgaaagcataatacaccagaaaaaatgttaggacaagacgtgtcccttaggtattcaactagatttagatttgttaagaagggtaattagggcaaaaaatggactaggactagttaaacatatgattgaaaagtttaattttgaaaacctattcgattcaaattcattaatctgggctgtcaaatagtcatcatatttcggttagaaccaggtttcgtttgagggtaggaaaagaatagttaaaaagagctcatccaaataacttctattgtctgtttatatagacttggaaaatattgatgttaatacgaggtccgtcttattaagagcccttgagttagagtttttcccaaatgataataatcttacacgttactacactattataaacactgaaaacattgagaaaggagacattcaaggtaggcccacctatgacccagccacagttaaaggggtagaactaaacgataatttagatcatataaatgatatcaaacataaaattagagacattatcctaagaaattcaatcgctgaatatgttgtaacccgagatagaaattctaccaatacgataatcgtaatgaaacggacaagcggcgaatctatggggatatttcattgtagacattgtgcaatggaatttgatgacgaaatccaactcagtagtcatttacggatgcatttttttatttgatacaccataagtcgtgtgttacattgtaatgtagtacggacagtggctgcatgcatcggaaataagagatttgatgtgaaatttttagacatttatttataaacatcctacaacttcggttccgataaaaaagaatgaatgaataacaaacattgcatgattcggtattttacatcatgatggtacaaggacattcattctgttccttctagcagacaatatctaaattacattttattagaagataatagaatatacgggttaattaaaaagataatacctctatatcctgcaagactttaaaaacgaaatcaaaaaaatgagaattaagtagcgcccaaattaaatacaaaattgatttcaccggtttgtataccaggactgtaaccaaaaaaggttacctcgtttgacatatcaaatcactagagtcaccgaatcagactgttaccctacccaaattaaatactagccgtaaaacccagcattctcctatgcaaatcaaagatttttagcccatagccaagatttatgagtagtcaattgtcacaccatcttgaaaagtagtacttgttaatcacagtaaatttaattgatccccattattacttatcccttcttggaaatagatctccaatgaattcataaaatgtaagttcaattagatacatcgcgtttgacatttcaattacgctatcccacaaatattgtttgcatcctatagaatttacatcaacaaacaagtacttctctacactgatcactgaattttcaattttgcagagtaatctgattggcgatagtatcttgtgcaatcgtataaaaagactattttgaacctcctcttttagatgttcaaagtcgcttctatccttggggttaaatgctacgctcatacggagtaaaaacccatccttaagatcaacgtcagaaactatttcaaaaaattttatatcctggtttggtggaaataccttggcatagtactctgatgaactagttctggtgttttcctcctttatggtataattataatccttcaaccactgaagaatagtgctatatactagatccttgttactatcaggcaatgtgttctgttaccagatcaaatatttaaagagattgaatctatcatcatcccccccccctgaaatgtggttctgttaactaaatctcctattgcgtcaatgacaaaatatgagaactattcatcgtcataacgaaaaaaggaacaaatgctactttggcaattaccatatggtgagcctcaacttttaagctgtagtcaacaattgaaaaccggtaatcaaaatatcctagcctgccaattttccatgcaaaagttttataaaacaagaaaagaatgaatgaataacaaacattgcatgattcggtattttacatcatgatggtacaaggacattcattctgttccttctagcagacaatatctaaattacattttattagaagataatagaatatacgggttaattaaaaagataatacctctatatcctgcaagaattcataatagaaataaaaccaaatgcatcttgctttcaagtttaaaaataaaaatggaaattcggccaaccacattttttaaattttgtcggattattacaaactagtaggtaatttttttcttgttcgctaaaccaaactatgtttataattaacttaatttaaggtataccagaaatgacaagattaattctcaaaccaggtagatggttaatcatagtcggaaccttattgataattatgggaatcatatttcagtttcagagtatttctttgattggaccttcttcttcttttatgtactcaaatcaagattggacctacaatggccttataattatggtggtaggtatagcttttttagtaataggactttacgtgaaaacaaaaaatgatagaaatccctcaatttcttgaaattgttattttaaaatctaaattttgattcttgtagttagaaaaaagctattggggctaatttcaatgtttagtcaggtatatagtaagtattttgattctctcttgatcgttactaaataaatctataaatttagatgtataattataaggtacgccttcaataatatttcctacataaaaccctaaatcggtaaaagtctcaacaatccactctttccaattcatatattcatcataaataacgggtgaaaaaaactcgtctgtaaattcggttattaacagaagatgaccatttttcttaattttgtgtaatatggttttgtatattggtttccaaaatctcatattttcacgatcaatatatttgggatgcggtagtatagacaaaatttcatccgctgaacaatccggcaattggtcaatcaccccctcaaactgactatttacaaataacaaattagatttcctatttggaagtaaaagacaagatttcctgtactgagaagcatctatttctattccaagataaaaagtagtcgtttcttcttctttgttcgataatcgatataacaattttccatcgccgctgccgagttcaactatcagtttatcatacttggtcaaaaatgacatgtccatgcagtgatccatttggcaaagaactacattggatttaaacaaactcgatcgcctcttttgggatgtttctatgttatgactggcttatctactcagatattttgacagaaagtgatcataataatcatacccaaataacatgtgcaatctagtattatttatagcgaagtaggaaaaggaaaagtaaattcataactaggtataatgtaaactatggatcgtgctttttttgatcaagttatcttggttactggtggtacaggtgcattgggctccaaagtatcagaagcatttatgaaattatccccaagagcacttattataacgtttagatctgaaaccgaaatgcaagaattgagggaaaagattcttgaaaaaagtaatagtgtacaaaatgataatcatgatacagtagtcgaattcatgaaggtagatattactcatgagaatgaggtcaaaatactaatctcgaatatacttgagaaatttggacaaatccatgttttaacaaatatagttggagggtatattggtggcaaaagtgtaactgaaacaagtgaagaggaatgggataaaatgatgtctattaatttaaaatctgcatttcttataagtaaacacgtgttgacaactatgaaaaagaaagagtttggaaagattgttcatgtatcttctgcaacaggagcaaaagcaaatggtaatgattctgcctatgcagcatcgaaagcaggattaataagattagttgaatctatggcgcaggagataaggggtctaaacataaatatcaattgtgtactcccaactataatcgatacagaatcaaacagggcatctatgcctaattccaattattcaacttggataccaccccaggatttggctaaggtgatttgcttcttaagttcggaggaatccaaagttatcaatggggtggctcttccaaccccgggaacttcaaaaggctcgtaacctttttcctaatttagtgaagggccatcacagatttccttatattaatgggcaagaatcaatccaggctcatcgataatgggcgagattaaagcatgattatcatgaaaatccgtgtaacgaggtcgactatcggtcaatttgtaatttctatgaagaaaatttcaaaattgattgaattgaattttactgagtgggcaacattcattaacaagttttattttgagaatctttaattatttaataaagttgttaatctaccgataaatctatagatcaaaactgtcttctttttaatacattacaataaaagaaacagaatacattcaccaaatattggctatggattaaatttgtattttcttgtattttcaacttaaagtttttcaaaggcatttcttatttatgtcaaggagaaatcacataactatatgaaaacaaactcaattgtaatatcccgagaagatatccatccctaaaagggatcgtagaatacctcgattatgagactaatcaggctgattcaacattaacctgcctatgagtcgcaattgaactaaaaagcatggaaattctcgctctccatattaagagagaaacatgtttgtggctgaaaggtttctgtcgtgtttaatcaatgggtatagaaattatccacttaatatcaattattgtactggtacccattggcccatagattcttgagatcgaaacaccagaatcattccatacatgcgtacagattcattgataggacaattcaacatttcacgagtaggatcgaaggttttggtgactattgtttctgtatcaaggcacattgtaatctgttttaattatgtggctcaacctatttgaacgcatagataccaaggtggttctaaccactaaacttaacaacccaatcaataattaaagtaactttatcctttagatttagaaaatgagttggaggatttatttaacgaaaatcatactaactaattgtcgaaattgaaatcaacccaggatcttaaggatgatcatattactataagaagaattaaagaagttgctttaaaatgttcaaataggttatataaaaaccaacctgttcctatagaagatatagaaattatttcggtcgtaatagaggaatttgttgatcattttcaccacggaaaagaagaaaaagcatactttcccgagactaaagaaaaaggcgaattttcaaaagacattcggaaatttctgattgagcatgagtttggaagaagaatagccattatgctcaggagggcagtgaacaactggaaatcgaaaattaaagaagctaatcagaatgaagagcaaacaaaagcgctactagaacctattgcaagattcttgaaagcgtatgccatttttatagaggaccataccaaaaaggaagacaaattttttgatagcattgaagaaggtaaaattatttcaaagagcgatgatgaattattactaatccattataaatcatgtatgaatcaagcaggtgggaaaataagaatagaacaaatggttaaattaataaattatcttgagaatactgattggatggcagattgattcaacccattcgaggaacatattagagatgaatctaaaatccatatcctctcccgtgtaagcatcagtaggatcttttagttggtttttcaattgcattgaggtaaatttcagtctttttaatgcggtttgtagccgttcctttaatctgattaccacataagaaggaattcaactgagtatctctgcaaaaggtgggttaaagaaattagtttacccaaatcaataataggattatcagctaaagctgaagtcgattcctacagatctcattgtatcttctacgtcatttaatattccacccacaccagagccagaatcatctgaaccgtcattgttgttgttgtcaaaattaaatcctaagtcagaatcatctgaaccgtcattgttgttgttgtcaaaattaaatcctaagtcagaatcatcatcgtcgtcattgctactggtactgctaatgcttgagtcatcatcgtcgtcattgctactggtactgctaatgcttgagtcatcatcgtcgtcattgctactggtactgctaatgcttgagtcatcatcgtcgtcattgctactggtactgctaatgcttgagtcatcatcgtcgtcattgctactggtactgctaatgcttgagtcatcatcgtcgtcattgctactggtactgctaatgcttgagtcatcatcgtcgtcattgctactggtactgctaatgcttgagtcatcatcgtcgtcattgctactggtactgctaatgcttgagtcatcatcgtcgtcattgctactggtactgctaatgcttgagtcatcatcgtcgtcattgctactggtactgctaatgcttgagtcatcatcgtcgtcattgctactggtactgctaatgcttgagtcatcatcgtcgtcattgctactggtactgctaatgcttgagtcatcatcgtcgtcattgctactggtactgctaatgcttgagtcatcatcgtcgtcattgctactggtactgctaatgcttgagtcatcatcgtcgtcattgctactggtactgctaatgcttgagtcatcatcgtcgtcattgctactggtactactagttgaccctccaattcctgatcctggagaactgcttgcggtggtcttacaacatattggaccatttcctgtatcttgattgaattgttgaatttgtgcaaaaggttgtaatccacctgatgctgcctgactcatattaccactatttgtcgttgaatttgaagactctaacatcatgttatagctagataactgtgcttgtgtaaagttagtagctgtaatatttacagagtaaaatgcttgtaatgtttgtggaccatctaaacaaagaatcttagatgttattttgttgtttccttcattgatgtttgtataattgcttgctactgtgtattgccagttagaataatcattgtctccttgaacacctgtaggattaacattctgatagggttttacattatttatgatgacagaaacatcacaatctgatgttacattatcctttgaaactcctttgattactagtgaattgtttgaatttaatgggactagatctcctttatctggagaaattatctttacaccgcctgaaagctttgtaatatttgatactgtgtcagaaacagtgggaacagaagagtttgtcgtacttgccgaagtattttgctgtgctaatacttggatgtttgcattatagttgatgtttgataataataatactatcaatagtcctgcaaaaataataccaagcctttttaccataattgattttgtaatttatatgtatattaaagtttgattagatttttctatatgataaaaccagttatatgttcctgccaaacttgatcgatatccgatacacccttcaactggaaatgagttttggatttatgtggacacctagaaatatcaaatatgtaaaacctgaagattcttttagattaattctgttatgttcccccatattgaattattcttttgaatcatcttagaagctgaatgctaaagccaaattacccattttgaatagttgaagaaatagcttttcgactatgtggatttctctagaaatttttgacttgaatcgcattaagtttggatttgatttccgctgaattaaaaaattaacatataatcaaatttatttttgaatatattgactgatattcccttatccaaatcattgggtttatagaatgttgagtatcagtgttttatatagaactgaagaaatagagcaccaatcaaaggaattggaataaaatacgagtgggcccaattatcgctcttcagtattcatttgtaataagtttattacctgtcgtctgatttcgccactaggatattgccctgtagggatatttggacaggaattgtcttcctcaaatacttcgataaaatctgagaattgtatgtctatgcgtggacctgtaagattattagatgtaagaggcccagcttcagatacttggtgttgagaagtgtcgtctttaaataggtaactataactgatccgttttcccctttgataccataataaatgttccctgctgtagatccctctattctgatggcattaacagtgcattaaacactgttttcagaaggcgtggaatcagcaatttctactactggggtatccactggtggagatatttcgtctgagaaaaccgtactatacggagtatcacttccatgtgcatttgggatggcaaataactttgataaatagctgaatgaacttattctaaaatcatggatataccaaccaaaagcccagcacggatcattttttcataaaaccgaattactaattcgcgctatttaggtaatatattaagaaataagcatacgttttccactacccattcaactaatcttaattatgatcacaacaagattattctaataaaacaattagattaaataattccataaatatatttatgaaaatgactgacgaaaatagggaatttatctttaacaatattacccgatggttgagagactctaattttgtgatcagcgaagaaaagattacagttgttacttcagaattttatgccaaagctcatctacagtcagatcatgaacatattcttgaaataatttcctcctctggcattgaagcacgtttcgtgctgcggaccagattacaagtatccgaacaacaattagcggttattgagaaactcgggccgaaggaaaaacgaacattcaatgataaaatgaataatataataattgcccaacaccaatcgatcatctttagagataaatcagccgcattggagaaaataatctcgattgatccaaaatcaattgattctaaacaagaagtcattcagaatgtttcaagtttgttagaatcagcaaaaaaattagatattatttttaatgaatttttttaaacaaaaggatataaaaaataactaaatagaagttggcatgatgtatgtatagaataccttatttaccgctcgaatatcctacgatttttttaagtattcttacattctttaacctacctgagtatagtctaataatccaagagatctaaagggtcatccattacatcagtttttggatctaatagatattcatcacctaaattacacttcaagtccgtgcagagcataggattggattcatcctcagttgttgttgaggaagaggtagaggttgcggtattagagtgactattatactgctcatgacatgaaatatttggatcatctaattcgctacaaatagcatatgctgctccattattgttgagcgtcataaataatgtagacacactcaaaattgaaaatatagcaactattcttaataatgttctcatattgaagtatattattgcaaataatattagaatttttcatctatatactgcaagaatttttggtatttttctactgatattcttaagagaacatctctatctagtgtatttttcatagcactttacgtaattctattgtattccagagtaattggaaaatatccctctgcctccttaatttgatttcttaaagattggagcatttcggatggattagacatttacttatatattctaactaacataggtgatttcaattggagaggattgatgaaaaatatagcgtaattcctgttgacaagtttttctctatccatcttgccacttttaatccttgtctatcacttcttatagatccgatgattatagcgatctttgtcaataagactgttatatttgattacacaaatgcataaatctatcgtgaaaatggttattaaagtcttcagccgacaaaagtaacttcagatattgttgatttcctaatcgattttatattatatccattctgaattgagttcgtttaaaagattcaaacttaaaaaaattcaaaagaaaaagaaggatggacaacattctatgctgaatttaaatatgcccataaattgtgtaatagtaaaatatatttggcattccttatttcccaaccaggagggtttcggtgatcttatatttcatacagatgcaatctattcaatccggcaatattttaagtctaataattataaatagttttaattagataataaggcaatgagcttaagatgtcctaattgcgaatcggaaatgaggttaagcaacaaatatggggttgagattgatcactgcccacgatgtcgtggagtttggcttgatagaggagagctggaaaaagttgccaatatgcagaatcaatatgaagacgaccattatcaaaaatatcaccatggtaaagatcatgatgatgatgatgattattaccagagaagaaaacacaagaagaaaggctttttcggtgacatgtttgattttgactaaatagtaccccgctatttggccctgtaaatgagtaatatgattctttattttttcatctgttgatctgatcgttgctcatgctatatcttaattagctaatcattctagtggtctaacaaatcttaattgctaattccaagtctatttatcaatttttaagtatttgacaactcgcgtatcacttcattcggattatcccaaaataattgtggagacgtggtcttctttaattggtccaaggtgtatataagtaaagtatcctttttaaaacgaataataaacaaaaacttaatctttgtcgtagccaaagaatcctgtgcatgaacatatgtagcagtggtgatcatttgattgttttgaaatgtatttatgagaaatcctcaggtgaccacagtctctgcaaatatgatatttacgagaatccatcgtgcaatagtattatcattttgggatataagaattatttcataatattaattgtttattggtatcagatcgaggtagatctgattgaattcatactttcatgatgtgcatcaagtcctctactagagaccagtagtaaaagcgggaagttggagtggatcaaaccaagtttccttttcgaattaacattgagactggaaaaatgtttgattttttatgaaccaaataagtcttaccagataattcataagaaaattaccaagacaatcgtctaatattatataaatcctggggttaggaaggtggaactcaggatgttttccaattgcatctccgaatctatgttagattttgatattaaccatcctaacgattcatctcattgcttccatttctaaaatagggaactagatatggtattaagccggtggtttttatatgtagttacatttttagtcttatccgaatcagagggctatttcggttatcattaatttatcattggatttacccatccctgccatttacgtcaaaaccaatataaagaatatcaaacattatcatgtatcccgcatcttaaaaggaagcaaccaaaattttaaatcgtgacagttttaagtgttcttattataattaaatactttgttatacattctattttgatgtcagaagaaaataaaaagaaattcgactgtaggtgcggcgccgcttttgataccgttgaagaattagataaacataatcacgaggcgcattagaccagccttaatacaaggcaatagacgcggtttgtaattcaaccgccaatttgaaatcatttttcttatcaagctttgatcctgttcaaatgataattaccttgctacacaatgaacttgccaagccttcaaattcccactacgtttaatcaattgcatagttaattcacactggcagtccctgagcgggcattcaatcttcagttcaaattacaaatatgcaagctaaattttttgtagtcaccaaacatctactattgacataattgtagggtatcattattggtattgtttcttccctatgggatgttaaatgataatcaaaaaaaggacaacttgaacatcagaaggagtcaaacctttaagcatattattgttctagaatatagttaatagttaagctgataaattccacaagaaaatatggctaaatcagaaccgtcaatatagtatcctaattcgtttcatattgataaggttttttcaatcagcctatttccctacaattagaaaggaatatatccgaaagtctgaaacaattatttggattttgtaatctaatccgtataatcgcggcatttcgctaaggattatgattgacatttgataaaatgtatatgcccacgctattatgatttgatctgaaaccgtatctctagcaaattcatttcttaaagacagttattcaaattaggagatgtttttgtcaactagtaaccgttacctatatttattgagttagccttactttttttccccagtaattattataattaccaaatttaggaatcatataatgcaaaagggtcccaaaaacacgctgatctttggtctagtaacaacatttgattgactttgaatcatgctaataaaaatagtgggccctttcgtgtagatacttcccttcttcagtattgaaaaatgccccacaaaaatcgcaaaaataaatacccaattgtcctaaatcaccagattttaacaaagtgaatgtgttttctttttgagagtcttgtgctaccacataatcaacaataaaattccttttcagtgataagtgcaaagcatcttcaaaatcagttatggagcctgaaaattcaaactctacatattgtgaaagtgcttctgagttaacttcctgagatttaatgggacgttgtgggatcaggttgatagccttaaagatttcattgagatgctgtccagacacaaaagacaaatccaagtaaaatctcattaactaaattagattacacaaagccggtctaataaataaagcattccaggtgataaagatctagtaaaaacgttggaagaaggatttaattcattgtcgaggattaattattatagatactatcacgtttccaataataattatatcgaaccgctcagatttatatcaagacggttcctactagaaaattcgctaaatgagaaatatcaacaacaattatctcgcatgaacaaaatcatgagatggatttgaaagtcgttatcggaatgaaataacttgcatcatcatcctaacaatgggtttgtaattaccaaagttaaaatttcttgtgccccataaatcttaaaaaaacatttaatgtaagaatacaaaaagataattgtaaacatttgttgagcatatccaagttgagtgattaagtgtggtcaagctggcctgcgattaaatacaagttaagataaagttgaatttttgtattcaattgaatatttccactttgcttaatagttaagaaattggtagggacttttttgtcacatattatcgcagaactgtctctaaaaagagttggtgttaagcgatcgaaaataggatggttttggcttattgaaattctcctatccataataataataaaatacattgaaaatattatagatgcggttatacatttggcgactgggacttggtcacctggccaggcatttgaaggggttactgggatgcttgcgattgctagcgcagttatagtaggattgattctatttcttttatactctggcaagatcaaagttgaagataggcataccgatctaaagtattttgagattgtagatatacaggagttagaaaaggaatcattacatgacggtcttagaaaagaaataataataatttgtgaaccttcaaccaagttcgttatcacaattatggaatgcattttgagatcaaaagagatgaattccatagagaaactaagtatactcggacaagactttaaagactcatcccatttcgaaggtttagagatgccaaaggatgaagtaatcaaagaaatttggacgtcactttcaaagaaattgaaggaagaatttaatggatttgatcctttttcgaatcatcgctccaagttattctcatatgtgaatgaaactttcagacaagagtattcagatattatcgaattccggataacaagtcaacctatttacaagtcgatggtttttatcatctcttctgatcccaatacacctaacagaaatacagaattatacatcgagccttttgttttgacgacgatggaccaccaacatacagcttacagatttagatccccccaaaatcaaaaaaaatagtgagataataggatatgatctttttgaagtagaatattcaaattttcttaaatgttgggaatcggccactactagcggaaattacacgacattaagagatcgaaaagatggaagatcatttaattaaaatttatactaatgatgatatcaattaagactttttcattgaagactaaatgagttttagtacgaaagcgtttgctgtattatgcatggaatatatggatctaatgagtagagtggacaacatagaactacttggtgggatgattaaatttttggttactaatcttggtaaattaaatacggtctttgatcataaaggcggtttccgggatacgatttggatgaagaaactgtattgaaagattacgagaagatcctaaatccgcaaggatgttcgaagaatgttacatgggaccaaaatatgaactggatgagatgcttaaattacgatagggttcgttaggctatacagatgcattttgatgaagacgatgagttttaaacctcatttttatgactcaagagacaaaaaatttttggataatgatactgattatgaaacaattggggttagaaaaacgtatgatatgtatcacacaattagtgggtttgatatgcaaattggagaaattagagtaatagcattatatatgactcaatatatttatcctgctttcatgttaattgaattggttgcagtaggaccagccttttgcggggttagcaagcattcctaattctgaataattcattcttctccaatttttggacctttgtataaagggatcaagattgcacaggaatgtaagcctttttttgctgcaaaatatggagaaaatgcttgaaaggccacttgatgatgttaggattgagttgaccatcactctgatcaaagagggtcaaagttggtatcaatttccaatcataaaggaggctggaatttattaggatttttggtactaccgcataatttttggatgttggccaacattgatctaagcttttatttgtttttctatcataaattagaatgtaatccgtatgaacagggaagagatggctctaaacataatttccaaagctataatgcatgtacaaagtaatcctcaagttgtaagagaaaatggatgcgcggcttgccatgttttgtttgtattggctgaaaaaatgaatgtaagcgagcaagatgcttcagatttgctttcagaagttttagccaaatttccggaactagacaatgaatttatcgtaatggtagaaaacattcacatgaaaaatagaatgatgggaaatgtattcgcgattaaaaccagagaggccaaggacaaatatatatattctaattttaagaacactatcgctgaattacattctgacgtgataaattatggtccagatgttaccctccgaaaattattgatgtcattgatatcattagaaatagcaaagaatataggagttgactatcatgcatcaacagaagaactccatcactatatgagaagaaatcatcaagaaacaaacaaagaactgttgatatttattaatcaactttatcaaagaataaataacaagaaaatcaactacgaataagaacattattggtatatgttactatacaaatagttgaaccaggtcctaaatagaggacaaattttgaaactttctctattttatcattacacatcccatcgaagacattcgccttttgtagaacactaatgcgatctaaaaggatcatcattatactagaacttggagggactattaatagaaagaatttgggtttaaactttaatcaaggatgttgtaaatattttagatgaatattcgattaatatttttaatgtattgtagatggatgtcgaaaaatatgatatcatctcatgaactttattggctttacaccttggtcagaagactcataataataaaattgcatttagtaaacgtttctaaattaccactttatatcgaataaccaaaaaattttcagattgtatggaatttactttatgaatattacatttagtaacattgtgtgttgagattctcccatataatcctaattaataaaccacaatagtaaaataatatatgaacctggcattttaataaacagcaaactgctgcctaactcattaatcttgaactagaagagtacatctgcgttagttcgtcttgagtgctcatcaataccgttcattgtaatttggtattcgttatcccctattcgggaaacaaaaccacctactataagattttgaagggcgatatcaaaatttgaagaacccatattatctgtaaatattttacgtaattcattatcatttgtcaatggagtttgtttatttgatagtatgaataatttttctaatatcctgtcctcaatcttattaattgacgagtaggtatcctcagcattttgaaacttagccatgaatgtaaatatctattctatttatataattgcttttaactattaaactattttttgaatcattaataatgatgctgccaaaaattcaattattgcacttttgatctcataagggtatagtgtaatgcgtcatgtcgagtggattacagataaggtattaatgaatgtcgaataaaccaaaagatataacaacgtgaaagctaacaaaagggtttatcgcgcactcgtactgccgcattaaaattagaattccgagataaaaatcaataaagtatgagagtctagattgatctttttcaaaacatgtttatgattatcttgagttgaaaggtttgttttcagatagggtttgttaatgatctagcaattaagatgtcggcttgataactgcttaaacctatccataaggaccgataatacaagatagaaaaaatttcggatataatgaaaattttatggttcataaatatcattttcttggccatacaatttacaatttctaaactgatatgatagaatcatcacatttagcaaagtaatccttaggattatttgcaatttttagacaataatagagtaatttatctgacaaatcctatttacagcgttaattttttcataagtttatctcattattggccttaagatttaattgtaaattaggctctgttaacttaacgataaatctttagcttaaagacgctctatttctgttatgttaagtacaagaaagagaacatcttcagagcatatttactatggtctgtatttgtactttcttggcttatcgcttagaaatactgccaaggcattgtcctttttacacattatcaatagaagtcacgttgcaatttggaattggattcaaaggtataaacctcgaaaggtttcaacaagaagaataaaaatatcagaatacctcattgatgagacattaataaaagtcggctcagaatactcttggttatgggcagcaatcgaaccagaaaataggcaaattctcgcactctttcttagctaataaatccaaggagaagaacatgcttatcgcagagagagatttatttcaggtctgatcaagattcacggaaaacatgtcgtatcaacagacggtggaacctggtacccaatggcttgtagattcctaaaactaaaacaccatatcaattcttcgtttgagaaaagtctgattgaaagaactatgcagtacatcaaggatcgaactgaaggatttgacgattactttccatgtagtaaagagaagtgtaaactagatcatgtcaaaaactggttgaatctatttgtaaaaatacacaacaaggaggtgccaaacgcctaagttaacagcgccgtaaattaggaaagaaaatttaaataggtcgatagtttgagaagcaagttttgttgatcaagattttaccaaggaaacattcatctattcttgttacccatgcactttaaatcgttggatgtaatgttatccgtgtgaacgtaggaaaacaacagcataaaaatccaacccctactgtagataccataattcaaaaagattccaaaatcctgttagtcaaaagaaaaaaggatccatttaaacaaaggatggttttacctggtggatttgtaaatgaaggcgaaagggtggaagatgcagcaatacgtgaagtaaaagaagagacttctttagatgtagaaatcgacaacatattaggagtgtattctgatccctccagagacccaagaggtcacatcatgtctacagtatttattggaaaaatatctgataagagcgatagaaaagagcccatggcaggagacgatgcagctgcagtaaagtgggtagatctagcatccatagaagaagaaagtttcgggtttgatcataagaaaattttgaacgattataaaaaatggaaacggtctggacaaactttttggtcttcaaaaacttaaaacaaaaattgatttcatagtagaacctatcgaatgtatcaccacctatttctttaaacaagattttaaagccaagatgaaaatctaaaataactgaaatatgttagctttcataaccccttctgtttttgtttcgctacaatttgaagtcgtgtttgcaatcaaggaataatatacttttgaagagaacaagaatatctaagatgcctaataggaaatcttaagatagttgggacagggctatggatacacagaattagaatccacgatatcaaagctccaacaaatgtatggtaaaataacgctttgacccgaagtttcttattttgtataacccattaattgaactattgtaatccagtgtataccatatcccaatagaaatgtcctttattttccactaaattgattaataatcaagtttactttccagtagtaatagatttgtaattctattttataaatcaaattagtttataaacccattaatcaaatataggattttgagaatagaaaaatttagttatggagtcataagtttcttttaataattctaaatatcttttcgtatcgtacctaaaattgttttcatcaattagttcaattggtactgccctttccaagaaattctcaccataaaaattcgtaattatgtatttaatttcttctccagcattcaaggatttcccattgctagtaagtcgttttaaaacacaattttcaattgtctttctatctgcatattcattacttgcttttgatatccttttgataaatatcagatcggtgtatgaaatttttttagagcatattaaatttatatattttttatatacgctctctaaaattggcaagcatttcgtgatttcatgaatgttgctatgggcagacattattttcattaactcctcttgaaaatagacaaagagctcaggagtatcatgtcttcttgtttcaatccccctcatctttattgtcccatcttcaaaaacgccaaagtatctatttagggcaggtaagtcaggattgatcttagatgaatcgaaaacgatccatttgtatactccttcaaaagatatggaaaaacctgtttgctcctctatgtctttttttaaattaatatatcgatatgcagaatcggctgccgataatgaatatttcatattatctatttctcttatccagatagaatccacaataccatgaattacatcaaatccgtgtttctctactattttagacgttttcattaatatatctctagcaaaggcgcatacagtgatgtgagcatctatcctgccaaactttgagttactaaatccaagatatccaaaggaagtaactaggatccattttaaagcagtttgtctgttgtcatagcaattttttaaatactcatcattcttagatatacacaggttttttctctttttgtattctaaccgtctatctagaactgttttaagagataaaggtactattcccatcttttttttgcataagtgataaagatgttcgagttctggcactttgttatccgtttctgatctacagcatgcacaattgattgtgtctgaagaaacatttttccttagcattatatttggataaagagatataaaatcaaattctgctactttgttatatgctccaggttttgactcaaaaacaaagccccctttatctgcctttaataaatcagaaaatgacttgaagatttccgacattataggcttccagggtatcaatatatcctttttatgagcattataaaaatacaagctgcttagacacttccctatagtagatcttgatgctagttgtaatggaattctgcaaactctggataattctgctaatccctccaatccattgtccctgtaaataaatgaattgttaacatcgatgtgaattcggccgtatagaaaaaacggtcgtggtttgaaatacacttttccgtaagagaggtatgatgttgaggacaagtcattagatctaatatttttatttggaaacaacttgtttttctttagtaaatattctagatttgattcgcgattcaaattgatcaataactgattttcaaccttgttggccttggctctataaagtaaatgtggaaacaaaaattggtctccacctttagttaaaataatatcaggatcgattctattaatttcataagcgaattctaatattgtttcaagttcattttcttcagatatcgaaaatttttccttgatcacgttatccttttcaaaaaagataattctgatctttagaatcctatcctctaaatcatatcctattgattttctctccgaaattaattcaaatgacagaaatttaaaatttggaataatgtaatcaaatgagtcaatatcgtcgttctcatcgttaattatttgatacatattagttcgtactgattccgtggatcttgttttttctaggctgaataatccaagtggatagagatccttttcgtataagaaagactgttcaggtgatatatctacattgtatagtcgatagtgtccaaatctattagagagtttttcaatttgtcttgctaaatttaatatctgcagtgaatcagacagagttaatctcagagttacatccattttacgcttatcaacagcagtggaagaaggatactcaaatttgtattcaaattgatattccttgattgatgaaataattttaccattccttatcaagtctactaactcggattttaggtctgacgctacatatattgaaggagaccataaatactctagtctttttacattcccatttctttcttttatccataaaatcattctatcttttagatgataaatatcaaatagccaaccattcatggttatcagcaaatcaacgataaactgatgaggctaatagaaaaattttgaatatatttaatcaaattagtttgtatttggtgaggtaagtattgatccatgtttaatgaaataattttactcaaacgagaatagaattctattttactattaggatgaatatacaaatgagaagacatatctgagacattcgtcatattaataaatgttagaacatgtttatatctattacgctgcgtatactataattacgctatgtctacttaattactagtattgatcaacattgtattttaagtactgacgcattgttggtcagatgagttggatttaaggggccagtcaaaataaggcggtgtttttgaatggatccaaaatttatcatttttaggaattggatcataggtttgagatcctctacaatatctcaaacccgctatcggtttgtaataaggatgtactcttttatatgagtaatcaattgatgtacaaaacgatcagcggttaattatttaagaggattttttaccgtgatttgcttatattggtatcccttacctaattatgacaaattaaggatttgttttgctttagaaaggaaggccatgaatcagataattagcaactggtaaatatgccaacattcagaattttgaggctagaatcttgaaataaagattgcaaaaacagcctcaattaaatgattcagccattcacattagttattttattttgaggattaatgataagaaaagataaatagtgtacgaatacagcgaaaataaacaaaataattatcttattggtagtttgtttttattcaaaatatcaaaaatttataatttataggtggggaaataactaaaacgatgaagggacaaaaaaggacaaggattcaataaaaatataggtgtatttatcttccaaagtacgccttcacatttggtttgaatagatagtaaatgataatagcattgattattaccggaataactgctcctacatttccgacgatgattgatcccaggcccgagataaaagctattacagtaactatcaacgtgataatccaagcccattttagcccttgccataatccataagcaacaacaaaataagctaatccgattataatgagaactgcacctaggaatggtattaacgctactagagcaataccgcctactaaggaaccaatacctccaagaatagcaagaatagcaataattgtaacacctaaaggtctattgttttgcatttactatgtctaatgagaataacttattaaacttacatcaaaatagagtagtttcatttaatactagtattttatttaatgaatgttgtatctcattcgtgaattttgaaatatattcccaattaaaagttttcaaggttgtccttaccaagtgcaaatttaattcgaacagatcttcaaaattggattttgtaatacatgatttagactgcagcaatgcttagtctaatttcaattatagaaatattgtaagtcaaaaaatacaatcatttctattattaaaatattgcagtttgaagtgtctaaactatgatatgtataattttagatatacatcgcaataaaatggacggtctaataaaaactcacaaatttggaatattcgcaattatattcgttgcaacagccctaattggttcagtagtcgcaattgcaggagacagcaacgcagcatttgcaaccaaaaaaaatcaaatgtctcattacaagatatcattcaagagagttctacaggagaaagtgcagaatgtttttcaaataataatactttagcatcatgtaacaacgttgctttgtcatttaacttaaatgacggcaacaacgcagaagaccaacaataaaccacctcctctcttcaattttatttgtgttattccttatcattagtttctagccagatattcaaaaataataatatctaattactcccattccataaacttgcatttatctggtttcttatcagtcagatttttgatttgaaaaaagagtcataggggtatctcgaatctctaattgaactctttccagggatcgaccaatagctttgctatgcacctaatttttagactagtgttgctattaagtataaggaactgcgagggtgtccctcgtgatgagtgcaaccatacccatgcattaagatttgatgaataaagtttaccaaaaattatcatcaaaagctaataaaataatccagaatttaggaggtaagaaaaggattgatggtctatatacaaattgcaatccctaagaaagttgattactccatggatgactttatcgttgaactttccaatagagacattcaaccatcaaggatcaaagaagttcaaaatgacggttgaggaactgcattgttaacattggaatgaaaatactatacaagatattttcagtaattatgcattagtaatatcgataatctacccctcttgttcaacccgtaaacccaaatagggaattaaatttttcaatatcactaagttctgaattatcgattgatgattgttcatgagattgtgcatcagaattatcgattgatgattgtgcatgagattgtgcatcagaattatcgattgatgattgtgcatgagattgtgcatcagaattatcgattgatgattgtgcatgagattgtgcatcagaattatcgattgatgattgtgcatgagattgtgcatcagaattatcgattgatgattgtgcatcagaattataagtaaatacttcgttgtagcaactagttacctcatgtttggttggttctttttcaaaatacggatctacttcaacacctttactctcgtctatttttttatcgatgcaatcataaaatcctggaaggccctggtctagagtggcatttccagttcgaattggtatcaaatctactgcctgaccaaacgatatttttccttgaacaaaagtcgttaacatcattatggcaagagtaatgaagagtagtgaaaagattaatgaattttttggttcataattcatgcagtattattatgcagaaataatttaacctattctataatttcaataatttattttttacataacaaattcgagatacaattctagttcattatataattggagattataccgtaatattgatatcctattccattttaaattttaatttctcaccagacgacaaaatatttcataatatggttttgtaaagctttaatatcagagaaaattcgatatcaaatgtagataaaccttcgactatttttttgtatattcttaatcagcttaataaggcggctcaattatgtcggcaatattaataatgcattcaagagactttatcccatcatatgttctttggaacagaatctagaatttatcaaccgatcgaaaatacgataatatcattaccatacgacaaaaataacacttttgaaatcaaacttatgtaattgatttgagttacccaatcaaccacttgctgtgaaaatttaccggtattatgggatgtggatgctaaataaaaatcagaaaatataagaatacttatcataaatgactatataattgactccagcggctcctggatcaatatcttttaccaagtgaatattaattatttttctgttatctctttgcagaaaattattggtttcattctttattgtatagttcaatagaaatgtttactgtttcatcacaaatattttgagaatttatttttataaaactgcatcgcaattgctttcagtttttagtacttgtattctgaaatggcttcatgctagcatacttcacacttttttacaactattacctaaatcaaagacacgatattcaatgattaattgatggtcaatattcaattaatattttctgactttcagccactacattttaggtaataaggacatttcctaatattgtgaaggaattaagaactaagaatgtttgtgatatccatattagaaatattgtggttttgattattggttattgtgggctacagtaaacatattgctacatttcacgaagatcaatcctcaataaaaagtcaatgaacccagacaaaaccacgatatcctttggtatgcacatatccactgttgaatattgattgaattcaataaagttaaacgaattacgaattcttgttacatttagaattaatcaagactccaattcatcgtaaaatttatcaaattctagcggggtttgtattatatattaagagcacaaaatgagaggataaatagtacaagaacacatattatgtaaattgagaagaaaggaaagtattccaattattcttttctataggagtttgtctttatgctagattactttgaaatggagcgtgtaatagaagaacttgcaaaagcctatcctgctcaatgtgcaactacttggtttaagataacaagaaatcacaaaccctctgaggaggactatcgcaacaaagtagttgagtacatgaaaatatttgaatatttattagccacttatccaccgggtccagatacagatagactcaaagaacttgtcaagaggattttggcaaaagaaattgaaaaggtccttaaaggagacaataaagatgtagaaaggcggcataaacactatgtgatgaattctccttctccagtttattcaaatgatactttgaaggaagtttctgaacaacaatatctcgaaaaatctactgatattaccaaagttttaaaaaaaagacaaaaaaatagcaatgatgttaaattgaaaggagaattagagaatcaagaaatccataatgaaaatcataatatgatagtaaataatcgtcgacgtaaaaagaagttgatgactacacaagattagcaacaataataataatgatctctaccatatttttagacttgttcgatctttgcattagacaatgaatgtcgacagtcagaccaaattatataatatttatgtaaataaatagattcatgttaaaaagaagtcaattaatgattgcattaactaaggatacaagtaacatgtgtaaaagtattaagtataaaatcaatcgaaatatcaatttcacataggtattgggtcttggtattgagatctgttatgctatctcaagacctttattggctctcttaatcaagacaaattaaggtatgttagtaccgatgattgtaataaacccgaagcgcattcacataattcaaatattttcggatgcaagctcattttacttattcctaataacgtgaaagagcggctcaggactttttccataccttatttgtataacgtaaattcgaagattaaaaattaatagggtaatcaaagacaatataaaatctatgcccaaggtctagggtttttgcaaaacatggaagttattaatttttaaaaattgtctttttggaattatttaagcatattttcaccaaatttgagactaccaatttatagacatgttttcttaacctaaatatgaaagtaaacgagaggaaagttgctattgtgacaggaagttcaagtggaataggatttcaaactgcactcattttggccagaaatggctattccacatatgcatctatgcgaaatattgaaaaatctaaaaccatcatggaaattgcaaagaaagaaaaactaccattacaggttattcagcttgatgtcaatgataatgtcatagttaataatgcgatagacaaaatagttaaagacaacaagagaatcgatatattagtaaacaatgcaggatatggcctttttggagcattagaggaattgtccattgaagagttaaaagcacaatttgaaacaaatttttttggggccgtacgtgtaacacaggccgttcttcccacaatgagaaatcaggatggtggaggcacgatagtaaatataagttcagttggaggactagtaggtgtaccaatcctatctgcatataatagcacaaagttcgcgttagaaggcctcagtgaatcaatgtcatatgaattagaaccgtttggaattagggtaattgtaatcgaaccagggtttataaaaaccaacattatgaattctagtgtcttggctaaaaaagcctcagaggaaaaatcgccttatcattcctttacccaaagaatagaaagttattttaaatctatgatggacaatccagaatcatcacccccagaagaggtggcaaaagtaatactacatgcagtaacatccgaaaatccgcaactaagacttacggtaggtaatgatgcagcggccatagtccaagcaaaaagaaaaatgtcagaattagaatttaccaaattgatcaaacaacaaatcatacaagaatcacaatgagtagtgtgataagttattgtaattttagaatcaactctaattcaaaaataccaatgaattcttttcgaaatccattttaaagactgaaagacatgataagatgtatgatagcacaagtctcgagaatatgagaaatgaaatatatcgataaatgaatacaaaagaatattatctgaaacatcgaatgttcgtttggaactaattattacctatataggggatcaataaataggttttaacaagtatagaaatcttattaaaccgacaaagtaagagtgaacatatttgatataatttcaggattcaattctaagctcagtttcctccatttttttaatctagtttaagaaagatttttaatcttatcccaattgaatcatcttgtaaatgagtgatttaatatactcttgcagatatctaaattaatgactatgagattcatttgaatgcagaatggaaacatgttctcgatacggatttatttgtaaattagtacatcttgtaccatctaattaatcctagaatatgacaaaatttattcccaactataaacctgtattggttcaatttgggttttgaataaaataggccaaagagttagatggattcttactgatatcagaaaagcttcctgacagggccctgtcagattaatagaatttattaaattggtgaaaatggtatgaattccttccaattgcttgggaacatttcagaaatatgtctttgtattaagcattatctagagttaatgtattcgatcaattttttggcagtaattattttttcactgataattataaaaccattctagacattgaacatgagagcatatcatgaacttctaatatcgtcatatagaaatcctgaaggtatttctgtcaggtatcgattcggacatttctttgttccatcctgagctcacctaaaatcggccttgatctacccaatttgagagctgaaatgcgatgatggtataaaacaatgctactgcatatgtcaatgcggcaataattcgaatatgacattaagaaacacccatgaatggactgatgaacctaggttgttttagatttagcttgttctactatttcaatgaagcgtagacagtgttgactaacctactgcttgtagtaaggacgatgaatacttgtggtatttgttttttttagattgttttggtgaccattataccgatcgtactcgtcaccttatgtccaaaatatgacaactttatttacaatcctcttgagtgttctcactccttattattaccggcgatgtcaataacgatgagctgggtgctctcataatatcgccatttgacatcaatagctcacagtttaacagtccaatgtcacgaacctttccactatttccgaatacggtaatcacatcgtctatcttaaatggcctcgtcagcgacaaatacatacctgctatcatatttcctaaaagattctgtgaagcaaaaccgattacaagtgccgatagggtgccgattgatgccgctactgcagcgttttggctaagaaatgacaacacaatggcaacaaccgtgatagctccaagaatccttatgaggctcctcaatgagttggctgtctgaccagaatgctgggccgtaatcaccagtcgatacgcggaattggctactatttctataacaaggcatcccgcaatactcacctgtaggctttggaaataaattaaatattcgactggaaccaaccatatggttaggctcattgttaccgccaaaatagcgactaaaatgactattctctttacaactgaccgtttggcattattaattatttgactatttcttgttttatcaaattcagacatatttacaatatattgtacaggtttatacatcgattggtattgtcctgatgatgataataaaatattaaatcatgataaacatattctgacaaaaatattcaaacatatgaaaaaggtatggtgttaactatgagaaggtaatttagaaccaagtaatgaaaccaatagaaacgggattaacaaataaataaaattcgttaattcagttttcctaaatcaaggaagaatcgaatgagcatcatcaatataaaataacgcaagtagataaaatagtaatggagcgattaaacaacaataattttgtataatttaatttccaaagtataggaacgcaaccgaacgtttttatattaagacaatgatcatggatattttttaatggaacacccaggtataaagtctaagtgatgtaatcacaattagaaaaaatttttttgcaatgtatcaaaccattctatcggattcctccactattgactcctatcataataaagaatccaacaaatgcaatcaatgatgtagttcctattattgttattgcccaatctgttttagacaatacttgttttcctctctcttacacttcttttctaattcaaacattgtttttttaaaacactcgttaacaatgagtcgctttaacgcctttttcttcatttcgacgtcatcttttatggtcaccaattaatataatttttcttcaattccttattaacattgactcggaacttgcgttaatcatttatggattctattttttttctgttactcgatataattaatttttttgagaatcaaaaatcaaaaatcaagtacatttcatgtttaaaaatgatgttgatttaaatattttaaccaaaattgaatctaatctttaattttgctcagcctagacactggttcttattcaaggagattaagttccttgtggtagtagagttgtaatgttattatattaaatttgatatatgctgaaaataaaatctattcgtattgttccaattttacattcgaaagaatttagtcagcacccatgtttccaccgcaagcacaaaaataaaattcatctatacgagaattacaaaaaggacacagtccaacaccatcataatcaacatcaacagcatctttgccatagatcacaaagtgatcgtttatttcatcagctatgtctttgatgctcattaatacatagtataggatcaaactttctttaataggtttatattattgattaatttaattattgtttttctttttttgatcaaaaaattataagttttatttaaataaatataaaattattaccacatgcagcaatgagttgtaaattcttaaagatgagatacaagacctgccaccgtgcgaatcaaaaaaagtaaaatctgagctaaaccaccttgaaaaacaaatctgtgagcagagaatgcgaacacaatttagcatatgcaggcattggatcttggtattgagatctgttatgctatctcaagacctttattggcttgcgccaaagcctacatcctcttgcagaaggaatatatttatacatcaaatcatgataaattatttactaaagaggaaatatttacctagattttccctttattgatgaatctctttcatgatcatgacaaattaaggatatttttcttgaacaataagagaggtttgtcaatattacctattgttatgaaatttctctgacagggagagcgactgctgagctttctagacagacaagtccaaacatcagataataaatcctcatacccgtaggatccaattagtgatataaggtactaaaaagtcaaaggaattcctatagttagtagcttgatccttaaaaagatgatatgattcttaattatactgttcacacatcaattgcaaaatatccaaagcattaagctgataatctatatttttgcgttgcgaaaatatctcaaataatgatgggattaattcaaaaaatatatttatcaatattctaattctataatagacaaagaacgatgatgataacaataccgacaaacattcacttccggttactgtaatcattaaacgtattgctaaaaaaaataaaatcaaagaatttgaagaatggctttcaggaatttctaaggaagtctcccgacaagatggaagtacgggtattgatataattagaccaactaataatagtaaatctaaatctgaatacgttataatatttaggttcaataagtatgataatcttgagaaatgggaaaaatcatctgtacgaaatgaatggttacaaaaaggtaggggattagcagaacccgattacaatctacaaaaactgacaggcctagagttttggtttactccatttttgaacgaagaatcttcatctttgattccactaaaccctccaccacgatacaaaatggcaattgttaccattcctgatatatctattctgctgttaactttagttcctcaaattcataatttaacagaaatacttttaattccttatgcaataagacttgttatcgctattactataacagttctgctaatgacttatataataatgcctctattaacaaaaatactaagatcttggttattcaagatttggcaaaaatattgatattattgtagtaaattattataatcattaaataacagaagctactttccttcttaaaatcttggaatcccaaatgggttaactatgtttttagtaatatatttttgaatctacggaatatggtacaaattttcaacttcaaagctatataagcaccaccgaaaccttgactacatgaatctggtctattttcaatacaattacaacattgtactcaactatctttgcaggattaaactccattggtaatgaaagtccaataggttatttacaataacgttggaataattgtaatggctttccatgtataaatatgaagtcgatttaaaaccatttacgataagtattgacaatttctacatacactagttcttaagtccatattgtatgaagaaaatatattttttgcagatcttgaacttttaatatgagtaaatttcaaataatctatgtttattattaaacatcttgaacctgagagaggagatggactaacaagaggggttagtaatatcgataagatgtactcatttaattttttaagacattgattacgtcaaactttattctagtcttgttaaaaagagaatacaagatatggtgacataatcgcatattaatcaaaaactaattttactcaactatttttgcatttgagaatgacacccgcaaatatacatttgtacattgatagtatgaatgattttctaaatatttagatagacttcttgtttaaaatggttcttctattcataatattcttaaggggttactcattacaaatagacctttagaaatgaaatcgaaagacggttaatactgccgagtacagatgcaagtaaagtactagtagatatatcttgacagttagatattgtttcaatttcgataatcattacttcagcaagcaaacatgacagaacggtatagagtatcgacaatcaggataacattcttaaaagatgatgctatcaatacagtacagatagtatatttttcgtaatccagaattaatactggtcttatttcttaaaaaagtgaaaaaaatttcaaagatttactttgaaaaaatagacggaaaattcgagggaaaaggcccaagtcccatggaaggtacaaccaatactgtgacaaattcatttggagatgttgagaatgatgataccaaaccgcctggtgtttgcacggatattttttgagaataatccaaactgcttaaagttgcactagccacacctgtttgcaaattctttattaaatctagtgagtttagtgcgatatttagcgtttctggcgttaactgggttttttctattaaagtattcattgaacctgaaccacctgttaatgttgaggctatttttgaagattcggtagccaaaattaccaatttagtaagattttcaacaggcaattttgttacgataacagttactggtaaagaattatcttcagagtcattttgatgaggctgataattcaatgtagctgttacattattttctccaatggctacttcattaactttgaccccattgaccatactcattcctaccgtattggtaagagaatatacgctctccaattttttaactgcagcttgatcaattagttccatagagttgtttctggcctggttagttttatttttgagtgcattattagcctgatcgattatattcaaaggagagtttttgagtgcattattagcctgatcgattatattcaaaggagagtttttgagtgcattattagcctgatcgattatattcaaaggagagtttttgagtgcattattagcctgatcgattatattcaaaggagagtttttgagtgcattattagcctgatcgattaggttaatagagttgtttctgacctggttagttttgtttacaagcgtatctgttaaccctaatccgactccatcattactcaaagatggaagtaattgtgcaaaaatctgatttgttaacgaaatagatgcgataccaaaagatagaattgataacgtagaaaataggacaaataatttcttattcattagtcattttaccactgggtcatttattaacatatttaagatacacttaataaaaataaatgttccttaactagtttaagcagatagaaatgaagtgcttcttgtcaaatgtcaattattttcataaattaataagtaattatcctaaaccttactttcatattattattatatattaagtttttacagaaggatattctacacactttttttctatgttaagtatcttgaaattttttttataaatatttaaccttacctaaatgagaggttatttttctaccgagtaattcgaatagttttgcagatttatcaaatggattcatattttctattagatggacatgatcaaaagtatttggagaatcgactgtataatattgaatctcgtagtaatgtagtaagaagatagtgaataaaagttgatctctgtggggtctcaagatatttttacaaaattatagtcattaaaagacatagtaaacattgtaagatggatgacagatattcttttaacattcataggacttttggccactgcattttcggttgccagtactttacctcagatcagaaaggcactaagaactaaggacaccgaggacgtttctattcgatttcttgttgttctgatcgtaggtctttctctgtgggccatatacggactcggtagagcagatattgtgatacttattggcaactctattggtgtatcattaaacatttgtatgttagttcttaaggttagatattcaagaaaaccattggacgaagaatgaaaccaaggtttgagacttaattatagtcatttctagtactatattatttttgaaatttatcatgaattaacacaaataaaaaccacggacatatattgttccttagtattttgaaaggttgcgttgattccgtttaaatatttcattttccttgcagtttatgtaaccgactagggaccaggtttggcacgttaatatgatgacgggcgagaatatgactggtatccaaaaacaacttttaacatttcttttctttctataacttgagcactagtgtttcaaaattctccctatatgatctaattaatttattcgaaggcaagggacatcaattcaaagtaagcctatctgtaataccttatcaaaaagctatgaatgatactggtgtaccacctaatatgatgaagtctcaaaaatattattctattgagaataataaagaaccatgctcattacttaaggaaaggatcagttgcaatcatattgaaatcatattgaaataattcaacatggagtgtctcatagtttaattgatgggacaggagagtttagtaaatccatagatggaaataacgaaaaaataaacagaattattaatgacacatttactcgttattacaggttattaattaatgagtatgatataaaaaacaataaaatagacgttgaatcctatgtagatattggaaggaatatattaaaaaatcccttgatgtttatctagtttttatttgctcccccatttgatgacatttatacgagcaatttaaatttaatctcaaatttaggtatgctccccatccgtggacaatcttccacagattttttgatcaccatatattcccaattcttttaaataacatttgggaaatagacttaaaaaaatttactgaggtaagatccattattccatttataatttctaatgccgattattattatatcaaaaattatcgaggaataatactaaattttcctagaagtctaaagataacccaaattcaaatgataataaaaaagtagtaagagaagaagaaacttcacaaacattttgtaagatgaatatccaacaccatctcctcttgcatgattcaaagaacacctttatgttttctaaaccactttcatcgttatttttatgattggaattaagattgcattacgaggaaatacccgtatgaacaatggaatcaaattatagatctacttgataaaatacctttttcatggaggacaactttcattgattcatatcaaagaataaaaaaaacaagacagatgaatattgcgataacaggtcaaaagataaccataatatcaagtgatcaattgcttgaagatatctcctttaaagttaataaaagactgcatatggaaaaggaaaacacagtttatgatgagcgagataaaacaattatttccattaatcaattaaagcctaattcaaaaactgtcttttatgttaaataattggacacaatacctgtttcatcatgccgggataattgctcttcataatgatcaattttgctaaaattattgtttttaaatggaatctaattaatgttcgttcttgtatttttatttatcataatcttcaattgtattaatcacttttagataaggattaaagtgcgctaaattttgggactagatttcgattttttatgaaataagttctgagtaattgtaagactaaaaaatagaagggtttatcaaaaagaatcattcgttatacccatctttttatactataaaatgtaactgattctatgaactatagtttcatctttttagcgctgtttctattccccgtcatgcaagttgcacacgctcaaggtcttacagattcaataaataatgcagttgaaaataatattgagaatacgtttgactcgataaatcaggcctcaaacagcagtaattcttctcctggaactgaaaatggctcacagtctaccaccaccactaccaccactacaagcggacctggcaattcaaattccacttctacaacaatgaaaacaaatagtcaataatagattaaacgtctatttctaattgttatggcataagtacatccattttttgaatatttcattgattttttatgtttatatcctgtagcattttctataatccttgggaattttttattaaccatataatgtaaatccaccactatttacatgtaaatgacaacatttaggttgggcggaatggtgcttgaacaatacgggcaatgggtttaatgcatagtaaagtatagcaatattcaatttgactttaagaaaccggagggcagtttattaaattatagaatcgagatgtttgcaagtttttacgtcacaaaatatatttttaagtaaacagatctattcaaacaagaggcaaaaccgttggtatcggttatttctggttcaaaacaaaactgacttcattttatggtccaatacgatctatcattatcaggaaatagcattctaatcactactctgttactgggaattcacttgataactaaaaggtgtttcagcgtgatggggcgacatttaccctctattctaaagataaagacaccgtaaatctaaccagggataattacttcaacaataaactgagttttgtatgatggatagaaaatacaaaaaatataccacaagttatgcttgtacacagataattttataggtatgatagctttagaatccactatattggtatacatttgcaatattcaatggtaaaataaaaaatgtatgatcataatgaacgcgcaggaaaatgtaacaataatcataatcaatcaaaaatggacaaaatatttcttggtaaattatccaaatttatacaatcagttgaatccgaaatggatatactgttgcctggacctgcatccttacaattcatgtcatattacaagataattgataatatagtatcccagaagttggccaagaatatcattatcagactactgtgcacaattgacgaagatagtacccggctagccaaacacttagtcccatttataggatatagatcaataaaaccatcattacctaaatccttgtcaaattccctgctgcttataaaagacaagcaggatatgttatctttttcagtaaatatgaaaaatcaatcgtaccgacatgatactgagggtagcaatccaattttttccctcaataattggtcctattccaaagaaattcccatagtgagaaatgctgtttattgttttgatctcatttgggaagaaaaagaaaataatgataaaactataaaggaaaaaatgcattctgaactcttgtttgatatactctcacatgatttaggaaattatcatcagataatacgcaatagcttggagattgtaacttttattgtagaaagaaataggaatgacacaaacaacttattccagaacaacggagaaatcttttcatttcttacaactgcaaaaaaagcaatagataaaagtcaatcgcttttagacaacttacgtagattagaacggctatatacacaaaaggatctaaaattagtattaaagaatcttccaaatgctatcaataatgcatatacaacattggaacaaacactaactgataataacccacaaggcaaaaggatcagactttctttaaatgtagttgatgaacttaaagataccacaaatataactataattgcagaagatctggtggaggaaatttttgttaatttattttccaacagtgtaaaatacacagaatcttcagaggttaaaattgaagttctaataagagaatattttattgctgaggtaaaatattggatggtaactgtatctgattatggtaaaggaatacccgactcaatgaaacaagaattgttcagtagattttattctaaggctgaggggagtggattgggtttatctatagtaaaaacacttgtcgaaagatataaaggcaaaatttgggtaggagacagagtgtatgaggactacaaacaaggtactgtatttggaatgatttttcctgcatcacagtaacaattgtattgtatatgacgctaacgttaaagttttagatcctatccagctcaatactctggtgacagccctctatcaccgatccgttgaccattaaaatattcattaacattacatccagatagtatcgtggcattgctgcagctgtcttatctggtttaatttaaaattattatcgatatctttggaatcgtatgcacaaataccaataataggcaagttaaacctttgttccaagcatgattcatattcaagtaattcctttgtaaaaccgcttctgaaaaatgcgctcatatccccaaaaactcggattcctcttttacctttgctaagacagttttcaactagtgtagaccataatgcaattgttcgctgaatattaggtatcccatcggggaaatatgtttcctcagtggttctgataataacatctcctcgggtttcgagttcatcaacatttaattgccaatcattttccatccttgcacggatctcatattttgggagatctgtggttgttataacagcaacctcatttctttcaagaccatcctttagaaagacaaaggcttcattgaatttatcctgtttactaggatagactgcaattatgtgatttcctttctcgatagtctgtatcctccctgccaatagatttcatatacgtagatccaaaatataagaattttgtttctgaaagggcaataatgaggataatatataataattttgcatatgagatacgttatcacaaatgttaccatatatcgattatctaactaccctgactatttatgttaaatagacggcagaagattagtaaagaatcttagagtttattgcgatccattttcattattttcttgaccttcttttgactgatatttccactaatcccaaatattctcatggtactttattgtgagaagaatttaacttcataagtagcccttcagatattattcaggctttaatgggttgaacaaaatccctcatctgtttagtaatagctttaatgtcattcaccaaagatagctccttgattcatcagccagtgggcgttgttgttgtaagaaatgtttgtaatactcgatttagtatttctagatattatttgggtaacgcatgaccagagttttttatttgtacagactgagctccaaggatcttttcggtaaaaattaaagaattttggctaatttacaatgataaatagtttacaacaatgggaccaaaaaaataaactgattattattgttgaataccaaatcatcttgtttggtttataactactaatttaatgtaatatggtgatcatatgagaagttcaaaacggatagcaaatcatataaaataggtgcggatcattaaagcatgtcaaacccaaaacttatgtatcttcatatttgattattttgtttattacaactattagctaaactgccttcccaactcaaattcaaggacaaccaattacttcatgaatctacttgttttcctgttgaacctaatgcagtgacactaatttgtccagaaagctcagaaggtggtacagatgtaaattcaactttaattgaggaccaattttgtcagcatactagaatgagattatgtcattttctggtcatcattcaatttgttttggcctaaaaattagtagaaagattaagagagaactttgtctcccttgctacaatatttacaaattatttcttgacctattctataatcatctaaacttaagaatttgaaacacctagagcaaaaaccaaagtcaatccgatgaccttttgtgtcaaagtggtttctcagtttttgggtcattcttaccatacaaatttaattaggaatctacaacataaaagattctcaacatactactgcgttaagaaaccacgctgtcatatcttaagattatgccctttgatgataatagttgttaacgctgcatcaaatatacctcttactatgtaaaattctcgtaagatattgtaaactatagttgttactccattaggtagcgaaagtgacgggccgaaaggtatgtagtacaaatttgggaagaattttggattctgcttcaaaaaagtttgcaaaattttgaaaatagaagatactgttaatgcctttcaatgaaagacaggacttctccccgaagtctttatagatatattcaaccaaaattaatttctattgattaatcttactaaggggcttaattccaatatcggttccttaacattggtcctattatggatttaagttcatacatgataaagaatactagatgtcctgtattagacctatctaatattcaatcttagactttaccatttccgtattattattctctctgtataatctatgcacaatacactcttatctttttatccaacccatattttttgaattcggcattactatattgaatatattttaaatctactcctcacttaattgactaagtggctcagatgagatccttttccctaatccatctctctattatactatataatcaatcctaatcgaagaataccgactaataaaatattgagataaccatgccatttgtcaacatgatattcggtaggaatggtttttactataaaatcatttctcatctataatttttggataattccaagttaaaagtaaaatgacttagatactcaaaatttatgaattcaatcccctttctgtatacgatgatttgttttttattaggttcgtgttttatctctatatcatcaacttgattatcttttgatataattacatcaggcctagaagcattttgaccatataacgaaagatattctctacctgaatttagatgcagattatagtgaacactttcaaaggtaaagtatgtatccggtgatttgtcaatgaaatctttgatttttgttttcataattgctcaatatgattaccaaatattaagtattttaaattaaatataattatctatcaaccaacttgtttacgaggttaagagaggtaatatagagtggaaattaaaatttactccaattttgaaaaataatagtgtcagataaaaaataacaagattgcaaatatataacaaatagcagaatgtaggttttgagtcttggtgttgagatctgttctgctacctcatgacctttattggcttgcaccaaagcctacaatattttataaaagtaaaatttaatatgtgaaatgaactttaattttcggacaaggaattatttacctaaatttttaaatcgtttaagaggcccattccataatgtggacaaattaaggccacactatttttaaacatttagaaaattagttatcaatttatctagtacggtataatttcactgataagaagagagcggttgaccctattgctagacaaagaagacctccagcaaggaaatatagcagattaccccaataactattggttccaattgctgcggaatagacatattccaatccaaaaacaatcatgaaaagagaaaaaacagttcccatgaaaacaattatgattttaatagttttgttcatagagaattaaagaatggcgattggtaatcacataatgatgtcagtctttttatttctatttgtgaaaaatttactctcattgtaaaatttgaatgcaacattgaaaattaaaatgtaaaatcaacaccctcatcataaaagactatataatttactccagtgactccagcatcgaaatctttcaccacttgaatattaattatctttttatttcctctctgaagaaaattattgatctcatccattatagtatcattccattgaaatatttcctgttttatcatatgtattttgagaattttgtatataaaactggatcgcaaacaaatctcataacaaacttgggaatttttggattccagaagatactaaagactatttgaaggtaatataaaaaacgaaacgctctttttacgagccgcttttcttagaatgtttaattactggatgtaaagaaatatgatcttaaactcatcaatcacatcgcaaaaatttttaaatctgcttattgaagataactaacataattaaaattcatcttagaaaaataaagattaatttctaaccaacattgtactggggtttttcttgaccaatcatatagtactgtctatggagaccgtcatggttacaatggttttaacgatagtattgataatctaaacaccattttaggcactaatatttacaaagtaaaaatgatctgagttaatatttttaattttttaaaaaatattttcgtcaaatgaagaattaataaagatggatatttgaatataactcaagcgttagttaatttagtatatgaaaaagatcattactgctgtattctccgaccttgataataaaaatatgagactagaattggacagttcaccttctccaatgacttttcaggcaatactggaccatctaccagtcaaagtcaaaattaacaggtggggggatgagctctataccgatccaacagaaataaatgctaaagaagaaaatgcaaagacggaagttaatgaactggatgtagcatattggcctgaaggtaaagcattatgtttattcttcggtccaacacccataagcaaagatgggaaaatattggcatattctcctgttaatatagtaggtaaaatcatagatgatttttcaaataaatatgatatcttaaatcaaattaaagtcaaaacaaatgtgatcataaaacaatgaaaagataattcaaggtctcgcgtagtgcaatacatccaaatgagaactttaaattcccatatattacacaaacccaaggagggttagtctttgcaggtgggatggattcgattaatgtcattatcagattcagtattatctagttcttattataatccagtcagttgaatggaagtcgaggagattttgattcctaaccgattatcgcctattttacgtacatcaattcaaatgaccagaaataaatttcggatctaaaaaattagttaaaaagataatctaaaatctaaaatcctttaactaagcaaaacccatgataatattattatataatattagggtatgtaacactctgaaatcagtcaattatagtaatcatggcaaggatgacaattcggttgaaaaattcaaaattaacaaaagatcagacgaaatcgccaatgaaaacatgactaatattcaagaaaacagtatcttagattttaaaacactttgtaatttgagacaaggtcgcttggaagatgtcttaagtaaaagatacgaatacaatacatccattgagaaaggtcaaagttttttacttcaacatgttaattccaaaattgatctggtcataatgtatgccgatatagcagcgtctactcaaatgagcatgacattgccaaccgaaacattcgttactatcgtaaaagcattttctcacgagttatcctcattaatagaaagttatggcggctttgttttaaaatatgttggcgatgccatcatatcgtttttcccttcaggattcaataaatatcttatttgtgatcgaacctatcgttgcgctaattcaatgttagcagcagtaagaaatgatattaatcccgtttttcgtagacatggctaccctgatttaaagatcaaaataggcatggccggaggagaaaatgtggtgatccagtatggaaaagataaaagttctcaaatagatttaataggatatcttatgaacgttacagccaaaataacatcacttgctcgccctgacaggatttctgtaggaggaaccttttatacgctattacaccctaaatcacagtccgactttgaaaagatttctttggaaaataaggattggaaatatatggacaaacacaatgagaagccttacaaagtatatactacttaatatgcaattgaataggttattgatggtcacagttaacttataatcaatttttattaccaaatgttagaaatcatactgttaattttgttttaacaataactggttcttcatttttacatttgaataacactttagttaataccctctattcatagaaccgaataaaagaactactatagtaaggggcccaaggaggtttgagcaaggtaagtaaaagggttcaatgagtactttaataattctcaagtttatttacatttgataaattggatttaatgttcttacaattatgggctaaaggagttgattaatatagtaaagggtctaaactaatttttccatatcacaatataggtacggtttaaatctaacacaaattccaatagatattatcctaattgaattgtctgtacaatcatcaaataccgcattatcaaagatttgtctctaaacaattatgacacataaatagaagcttgagtatctatctgttacatttgtcacactacattttactcataaattggacgcatcaagggattagcaaggttaaggaatcttatgatcgatatagctcatttagagcatcggtcgaaaaagcaggtggaaaattgattggaggctaccttacttttggagaatacgattatgttataattatagaagctccaaatgatgaggcagtaatgtctctggtgctcaaagttggttcatatgggaatgttaagaccaaaaccctaaaagcatttacagctgaggagggaagggagattataaaggaccttccatgaccttttcagtacaaaaatattgagcgtcataatggatttcaaataataagacaaaaactaattaaataattgtaatgaattaattatattgatattataaaaagtacacccacttcaaggtataaattttaatattattgaaatatatgacatgagtgagaaataacttttaaagcaaaggtgctatctggtataactagaggtactaaaactagtgatgtcatgcagaagataaagaaatattttattctagaggtcaggtcatttcgtaacattttatgaaaaaaccaatacctatcaaattcaaatacattgggtaaacacatttcatatattaccattctgctgacattttattagtactaatactaatgatagcatgcgttatgcttttaattggtaaaatatgaaggaaataggtggccatctacttggtaaagagtttattgcagttaattaatataaaaagaattcaacgtctgaattcttaggagtattcaccatgtcgacatgtattttgattctgactaaatcaatatgtaacaagacatccgatttctctagattattcgtggaaccgtagaggaagggtgaatgaaaatgtagcgccttttccatctttattattgtgagcccagatttttcctccatgtgcatcaataatctctttacaaattgccaaacccaatccagttcccccgtattttctggacgccttcacatcaacttgatagaatttctcaaacagattgtcaattttatcttctggtattccttctccattgtcttttacagtgaataagagatgctttttgttaatatatgcagcatcaaactcctcttttttatcttctcctaactcttctacttttaataatattcttccttcttcgcagggaacaaagtcaacagagttctttattaaattagataatacctgctctattcttctatcatcacaaataatcgtggatgatgtttttgtgttaacctctgttactatagtaacgcctttttcttccaatataatttttaaatcatttactacattagtaaaaagatttaatatgggtatctctttttttaatagatgtattttacccatactgaacttatatatatccgatatatctttcaccagagattctagtttttgttcatttctttgaatacattcaacagcccctttttgttcttcatttagttctcctagatctttgggttttaacaacaaatctgaaaaacatttgatcggaaccaaaggatttataagctcgtgacttatcatggacatgaattcatctttggctttatcttcatatcttaatcgttcgtttaattgctttaattgatttgtcaattctgtttgccttttagtatcatttcttatggtggctaccattgagttaaatgattcaattaatgtcgaaagttcatctttaccgttataatcaactgatatattgaaatttccttttttgatctcagaggttgccttggttagtgaagagataggcttaagcaaatgtctaactaaaaacaatataaatagaatcattagtataattaacacaccaaagataatctgtaatagaaccagattattctgattgttttttacttgttggcctagttgtgtaaccaaagcatcagatgaattaataagaccaaaagctattggaacaagttgttgccttaacgaataatttagactattatcaaaattagattgtttttgtgtgactgcatcattatatatcttgtcaaccaatagagttttaaagtcattccaagtcgaatttactatattccaactgtccaagaagctagttggcagtgattgtgtatctacaccggaaatttttccaccatcttttaataccataatattagactctagctgctgttctgcactttttatttgtgaaatatcagtattgtaattatttgttggtgaccggatattcaaatagtctattgcctcataaaggacatttaatgtaagaaaacggttttttcctgcgatattgatagtatttcccaataatgtttgttgtgactggatatatgttaagacactaaaaataatgataataaatataatttgcacaagggacaatatcccaatttttacaactattttggagaaagatcctttaagaatcttttccatataaaacatatccgtatttgtagggcgaaacatataagcattgcaaattatcagcatttaatttcaaattcgcatcggtgacacaattaaaggaattatacagaattcactagcgcaaccaactccgttgaatcctcgaatgaattattggtattttagtagatgtaactcatga
